(19) United States
(12) Patent Application Publication
(10) Pub. No.: US 2006/0193866 A1
(43) Pub. Date: Aug. 31, 2006

(54) H pylori antigens

(75) Inventors: Andreas Meinke, Presabaum (AT); Du Min Bui, Vienna (AT); Eszter Nagy, Vienna (AT); Tamas Henics, Taorstrasse (AT)

Correspondence Address: FULBRIGHT & JAWORSKI L.L.P., 600 CONGRESS AVE., SUITE 2400, AUSTIN, TX, 78701, US

(73) Assignee: Intercell AG, Vienna (AT)

(21) Appl. No.: 10/553,928

(22) PCT Filed: Apr. 22, 2004
(86) PCT No.: PCT/EP04/04255

§ 371 Date: Oct. 20, 2005

(30) Foreign Application Priority Data
Apr. 22, 2003 (EP) 034-50097.5

(51) Int. Cl. C07H 21/04; C12P 21/06; A61K 39/40; C12P 21/04; C07K 16/12; C12N 5/06

(52) U.S. Cl. 424/164.1; 435/69.1; 435/70.21; 435/326; 530/388.4; 536/23.53

(57) ABSTRACT

The present invention discloses isolated nucleic acid molecules encoding a hyperimmune serum reactive antigen or a fragment thereof as well as hyperimmune serum reactive antigens or fragments thereof from H. pylori, methods for isolating such antigens and specific uses thereof.

[0001] The present invention relates to isolated nucleic acid molecules, which encode antigens for Helicobacter pylori, which are suitable for use in preparation of pharmaceutical medicaments for the prevention and treatment of bacterial infections caused by Helicobacter pylori.

[0002] Helicobacter pylori is a Gram-negative, microaerobic, spiral and flagellated bacterium representing the most prevalent human pathogen with nearly half the globe's population infected. Infection most likely occurs in early childhood (<age 10) in most cases and the pathogen specifically colonizes the stomach where it becomes a resident. Colonization lasts for years or even decades but it can persist for life, yet about 70-80% of colonized individuals remain asymptomatic and never develop disease. It is now clear that the prolonged interaction of H. pylori with gastric epithelia is a complex and dynamic process, which leads to chronic acute inflammation of the gastric mucosa and to the development of peptic ulcer disease in 10-20% of the cases. Nearly all duodenal ulcers are caused by H. pylori and, in the stomach ulcers can develop into gastric adenocarcinoma with a frequency of 0.1-4%. The significance of this number is that gastric cancer is the second most common fatal malignancy after lung cancer and within twenty years, it is predicted to be the 8th leading cause of death of any origin worldwide. H. pylori infection is also associated with about 90% of mucosa-associated lymphoid tissue lymphomas (MALT). Patients with H. pylori infection develop high titers of primarily IgG and IgA antibodies but their role in the immune response against the bacterium is not known. Presence of the bacteria within the mucosal epithelium is associated with massive neutrophil infiltration. Considerable evidence exists demonstrating that the H. pylori-induced Th1-biased CD4⁺ T cell response with prominent IFN-γ production might be a strong contributing factor in the outcome of the local immune reaction linked to tissue damage.

[0003] H. pylori is inherently equipped with an array of extremely potent factors and mechanisms that enable the pathogen to uniquely adapt to the gastric mucosal environment leading to survival and long-term colonization in humans. However, the known virulence factors are only associated with increased risk of disease and are not absolute. Perhaps the most obvious system what H. pylori developed is its powerful urease enzyme, which by converting urea into ammonia and carbon dioxide allows survival under acidic conditions. Expression of the cytoplasmic apoenzyme is constitutive and its abundance can be as high as 15% of total H. pylori protein. The activity of the enzyme is increased in low pH and the conductance of the inner membrane is also increased for urea under low pH conditions. The produced NH₃ diffuses to the periplasm protecting thereby the bacterium against the extremely acidic environment {Prinz, C. et al., 2003}. The vacuolating cytotoxin product of the vacA gene of H. pylori induces vacuole formation and, thus, perturbation of structure and function in epithelial cells. The vacA gene is present in all strains but its expression varies. It is now known that VacA acts through a Z-type protein tyrosine phosphatase receptor by increasing its tyrosine phosphorylation activity on the G-protein coupled receptor kinase-interactor 1, leading to marked detachment of gastric epithelial cells from their base membrane, a possible mechanism behind H. pylori-induced epithelial cell demise and consequent peptic ulcer formation {Fujikawa, A. et al., 2003}. A major virulence-associated genetic element in H. pylori is the 40 Kbp pathogenicity island, Cag (cytotoxin associated gene) PAI, contained in the majority of strains. The PAI harbors about 30 genes and one gene product, CagA was originally identified in serological studies as an important determinant of disease outcome in H. pylori infected individuals. The Cag PAI contains genes that have close sequence similarities to a type IV secretion system, known to provide a mechanism for direct transfer of bacterial effector proteins into eukaryotic host cells. Not surprising therefore that the CagA protein has been demonstrated as the effector protein that translocates from adherent H. pylori into epithelial cells in vitro. The subsequently phosphorylated CagA rearranges the host cytoskeleton, which then leads to pedestal formation adjacent to the bacteria {Bjorkholm, B. et al., 2003}. Although, it is present in strains expressing VacA, the cagA gene is not linked chromosomally to vacA. Strains with the cagA PAI and the vacA genotype (type I strains) are associated with higher frequency with patients suffering from duodenal ulcer, atrophic gastritis and gastric carcinoma compared with those lacking CagA and VacA (type R strains) {Censini, S. et al., 1996}. Human populations in distinct geographical regions can be differentiated based on genotypic variations located to the right end of the cag PAI {Kersulyte, D. et al., 2000}.

[0004] Attachment of H. pylori to gastric epithelium is promoted by a number of factors. The Hpa hemagglutinin binds to sialic acid components of erythrocytes while the babA2-encoded BabA adhesion binds to the histo-blood group antigen Lewis^{b}, present on gastric epithelial cells. babA2-positive strains are more frequently isolated from patients with peptic ulcer disease and gastric carcinoma than type 1 strains and, when compared to type 1 strains lacking babA2, type 1 isolates that also harbor the babA2 gene are more prevalent in patients with atrophic gastritis and intestinal metaplasia. The SabA adhesion protein is shown to associate with a glycoconjugate on the onco-fetal surface antigen sialyl-Le^{x} that is expressed on immature cells of the developing fetal gastric epithelium as well as on rapidly proliferating undifferentiated cells of cancerous and precancerous lesions {Dubreuil, J. et al., 2002}.

[0005] Another potent virulence-associated mechanism evolved in H. pylori is its natural competence for transformation together with the pathogen's highest rate of recombination of any known bacterial species. This mechanism makes H. pylori capable of acquiring new genetic material via horizontal gene transfer, a common phenomenon during colonization of an individual and this can result in the generation of novel pathogen subtypes (quasispecies) that exhibit profound changes in virulence markers, such as the cag PAI {Loughlin, M et al., 2003}. Such extreme genetic variability, with any given isolate easily distinguishable from most others by DNA fingerprinting, has also been proposed to account for the expression diversity of many cell surface associated or secreted proteins {Ferrero, R. et al., 2001}. Although, it is not yet clear why only a relatively small portion of the infected population develop clinically manifest disease, the above mentioned pathogen-related factors together with emerging host-specific characteristics, such as IL-1β promoter allele polymorphism, are likely contribute to the complex mechanisms that lie behind H. pylori pathogenicity {Blaser, M., 2000}.

[0006] Today, patients diagnosed with H. pylori infection are treated with a combination of one or two antibiotics and a proton pump inhibitor or bismuth. There are a number of standard combinations but re-infection (most likely from parts of the stomach where eradication did not happen) can occur. Current combinational treatment regimes reach 80-90% eradication rates in most cases but since H. pylori strains are emerging with resistance to one or more of the antibiotics that currently comprise any of the treatment combinations, development of new strategies is urgently needed for an effective treatment to prevent or ameliorate H. pylori infections. A vaccine could not only prevent infections by Helicobacter, but more specifically prevent or ameliorate colonization of host tissues, thereby reducing the incidence of gastric atrophy, peptic ulcer disease and gastric cancer. Elimination of severe chronic conditions would be a direct consequence of reducing the incidence of acute infection and carriage of the organism.

[0007] A vaccine can contain a whole variety of different antigens. Examples of antigens are whole-killed or attenuated organisms, subfractions of these organisms/tissues, proteins, or, in their most simple form, peptides. Antigens can also be recognized by the immune system in form of glycosylated proteins or peptides and may also be or contain polysaccharides or lipids. Short peptides can be used since for example cytotoxic T-cells (CTL) recognize antigens in form of short usually 8-11 amino acids long peptides in conjunction with major histocompatibility complex (MHC). B-cells can recognize linear epitopes as short as 45 amino acids, as well as three-dimensional structures (conformational epitopes). In order to obtain sustained, antigen-specific immune responses, adjuvants need to trigger immune cascades that involve all cells of the immune system necessary. Primarily, adjuvants are acting, but are not restricted in their mode of action, on so-called antigen presenting cells (APCs). These cells usually first encounter the antigen(s) followed by presentation of processed or unmodified antigen to immune effector cells. Intermediate cell types may also be involved. Only effector cells with the appropriate specificity are activated in a productive immune response. The adjuvant may also locally retain antigens and co-injected other factors. In addition the adjuvant may act as a chemoattractant for other immune cells or may act locally and/or systemically as a stimulating agent for the immune system.

[0008] Attempts to develop a Helicobacter vaccine have focused mainly on whole-cell and attenuated or subunit vaccine approaches. The initial “proof of principle” studies to generate an H. pylori vaccine were performed using inactivated whole-cell preparations and cholera toxin as a mucosal adjuvant. Although, such vaccines were highly effective in inducing protective immunity against gastric infection in mice, their safety and licensing as well as difficulties in producing H. pylori preparations in vitro in large scale eliminated them from human trials {Ferrero, R. et al., 2001}; {Sutton, P., 2001}. For second generation subunit vaccines, candidate antigens were identified by empirical approaches. The selection criteria for these antigens were linked to known or suspected roles of the proteins in bacterial virulence. Such candidates include the urease holenzyme and its subunits, UreA and UreB, heat shock protein homologues of the chaperonins GroEL and GroES, the VacA cytotoxin and catalase (KatA) ({Prinz, C. et al., 2003}; {Svennerholm, A., 2003} and references therein). Another set of candidate proteins were identified in subsequent studies on the basis of their immunoreactivity in in vitro assays. H. pylori genomic expression libraries were screened with antibodies from mice that had been immunized with H. pylori whole cell sonicates or outer membrane vesicles in the presence of cholera toxin. Antigenic proteins were purified from selected E. coli clones and their identity determined by N-terminal sequencing. Among known antigens, such as UreA, UreB, the GroEL homologue and Lpp20 lipoprotein, four previously uncharacterized proteins were also identified. One had homology to L7/L12 ribosomal proteins and the rest were of unknown function. A similar screening strategy combined with a chimeric fusion technique confirmed the Lpp20 protein as a vaccine candidate antigen {Oliaro, J. et al., 2000}. There are other proteins under consideration for vaccine development that are based on recent identifications employing multiparameter selection criteria. These include an Hpa homologue (HP0410) and a novel protein of unknown function (HP0231), both with high protective efficacy {Sabarth, N. et al., 2002}. Despite the benefits of both prophylactic and therapeutic vaccination in animals as demonstrated in several studies, bacterial eradication (sterilizing immunity) has not been described in humans.

[0009] Since the above mentioned identification methods are either empirical or limited to a specific selection criterion, there is a demand to identify additional relevant antigens of H. pylori using an efficient and comprehensive identification and validation technology.

[0010] The present inventors have developed a method for identification, isolation and production of hyperimmune serum reactive antigens from a specific pathogen, especially from Staphylococcus aureus and Staphylococcus epidermidis (WO 02/059148). However, given the differences in biological property, pathogenic potency and genetic background, Helicobacter pylori is distinctive from Staphylococcus strains. Importantly, the selection of sera for the identification of antigens from H. pylori is different from that applied to the S. aureus screens.

[0011] Three major types of human sera were collected for this purpose. First, healthy adults below <45 years of age were tested for H. pylori-specific IgG and IgA serum antibody levels by ELISA using total bacterial lysate and culture supernatant proteins. High titer individuals were interviewed and seleted based on the absence of medical history, symptoms or complains related to H. pylori diseases. Based on correlative data, protective (colonization neutralizing) antibodies are likely to be present in exposed individuals who are not carriers of H. pylori or not susceptible to disease casued by H. pylori. High titer sera from symptom-free healthy adults were included in the genomic based antigen identification. This approach for selection of human sera is basically very different from that used for S. aureus, where carriage or noncarriage state cannot be associated with antibody levels.

[0012] Second, serum samples from patients with gastric cancer were characterized for anti-H. pylori antibody titers using ELISA and high titer sera were selected for the screens. The third group of serum samples was obtained from individuals with duodenal ulcer and high titer sera determined by ELISA were selected for the screens.

[0013] The genomes of the two bacterial species H. pylori and S. aureus by itself show a number of important differences. The genome of H. pylori contains approximately 1.65 Mb sequence information, while S. aureus harbours about 2.85 Mb. They have an average GC content of 39 and 33%, respectively. In addition, the two bacterial species require different growth conditions and media for propagation. While H. pylori is a strictly human pathogen, S. aureus can also be found infecting a range of warm-blooded animals. A list of the most important diseases, which can be inflicted by the two pathogens, is presented below. S. aureus causes mainly nosocomial, opportunistic infections: impetigo, folliculitis, abscesses, boils, infected lacerations, endocarditis, meningitis, septic arthritis, pneumonia, osteomyelitis, scalded skin syndrome (SSS), toxic shock syndrome. H. pylori causes likely community aquired gastro-intestinal infections: self limiting traveler's diarrhea, corpus predominant or pangastritis, peptic ulcer disease (stomach and duodenum), gastric cancer (adenocarcinoma), chronic atrophic gastritis (CAG) and MALT (mucosa-associated lymphoid tissue, non-Hodgkin's type B cell lymphoma).

[0014] The problem underlying the present invention was to provide means for the development of medicaments such as vaccines against H. pylori infection. Particularly, the problem was to provide an efficient, relevant and comprehensive set of nucleic acid molecules or antigens from H. pylori that can be used for the manufacture of said medicaments.

[0015] Therefore, the present invention provides an isolated nucleic acid molecule encoding a hyperimmune serum reactive antigen or a fragment thereof comprising a nucleic acid sequence, which is selected from the group consisting of:
[0016] a) a nucleic acid molecule having at least 70% sequence identity to a nucleic acid molecule selected from Seq ID No 3-4, 16, 19-21, 28-29, 33-38, 41-42, 44, 48-52, 55, 57-58, 61, 63, 65, 67-68, 72, 74-75, 81, 84, 91, 94, 96-97, 101, 105-108, 112, 115-117, 119, 123-178.
[0017] b) a nucleic acid molecule which is complementary to the nucleic acid molecule of a),
[0018] c) a nucleic acid molecule comprising at least 15 sequential bases of the nucleic acid molecule of a) or b)
[0019] d) a nucleic acid molecule which anneals under stringent hybridisation conditions to the nucleic acid molecule of a), b), or c)
[0020] e) a nucleic acid molecule which, but for the degeneracy of the genetic code, would hybridise to the nucleic acid molecule defined in a), b), c) or d).

[0021] According to a preferred embodiment of the present invention the sequence identity is at least 80%, preferably at least 95%, especially 100%.

[0022] Furthermore, the present invention provides an isolated nucleic acid molecule encoding a hyperimmune serum reactive antigen or a fragment thereof comprising a nucleic acid sequence selected from the group consisting of
[0023] a) a nucleic acid molecule having at least 96% sequence identity to a nucleic acid molecule selected from Seq ID No 8-10, 13-15, 17-18, 24, 27, 32, 39-40, 45-47, 56, 59, 62, 69-70, 73, 77, 79, 82, 85-86, 88, 90, 103, 109-110, 114, 121,
[0024] b) a nucleic acid molecule which is complementary to the nucleic acid molecule of a),
[0025] c) a nucleic acid molecule comprising at least 15 sequential bases of the nucleic acid molecule of a) or b)
[0026] d) a nucleic acid molecule which anneals under stringent hybridisation conditions to the nucleic acid molecule of a), b) or c),
[0027] e) a nucleic acid molecule which, but for the degeneracy of the genetic code, would hybridise to the nucleic acid defined in a), b), c) or d).

[0028] According to another aspect, the present invention provides an isolated nucleic acid molecule comprising a nucleic acid sequence selected from the group consisting of
[0029] a) a nucleic acid molecule selected from Seq ID No 5, 7, 30-31, 53, 60, 66, 76, 83, 87, 92, 99, 120,
[0030] b) a nucleic acid molecule which is complementary to the nucleic acid of a),
[0031] c) a nucleic acid molecule which, but for the degeneracy of the genetic code, would hybridise to the nucleic acid defined in a), b), c) or d).

[0032] Preferably, the nucleic acid molecule is DNA or RNA.

[0033] According to a preferred embodiment of the present invention, the nucleic acid molecule is isolated from a genomic DNA, especially from a H. pylori genomic DNA.

[0034] According to the present invention a vector comprising a nucleic acid molecule according to any of the aspects of the present invention is provided.

[0035] In a preferred embodiment the vector is adapted for recombinant expression of the hyperimmune serum reactive antigens or fragments thereof encoded by the nucleic acid molecule according to the present invention.

[0036] The present invention also provides a host cell comprising the vector according to the present invention.

[0037] According to another aspect the present invention further provides a hyperimmune serum-reactive antigen comprising an amino acid sequence being encoded by a nucleic acid molecule according to the present invention.

[0038] In a preferred embodiment the amino acid sequence (polypeptide) is selected from the group consisting of Seq ID No 181-182, 194, 197-199, 206-207, 211-216, 219-220, 222, 226-230, 233, 235-236, 239, 241, 243, 245-246, 250, 252-253, 259, 262, 269, 272, 274-275, 279, 283-286, 290, 293-295, 297, 301-356.

[0039] In another preferred embodiment the amino acid sequence (polypeptide) is selected from the group consisting of Seq ID No 186-188, 191-193, 195-196, 202, 205, 210, 217-218, 223-225, 234, 237, 240, 247-248, 251, 255, 257, 260, 263-264, 266, 268, 281, 287-288, 292, 299.

[0040] In a further preferred embodiment the amino acid sequence (polypeptide) is selected from the group consisting of Seq ID No 183, 185, 208-209, 231, 238, 244, 254, 261, 265, 270, 277, 298.

[0041] According to a further aspect the present invention provides fragments of hyperimmune serum-reactive antigens selected from the group consisting of peptides comprising amino acid sequences of column “predicted immunogenic aa” and “location of identified immunogenic region” of Table 1, the serum reactive epitope of Table 3 especially peptides comprising amino acids 63-91, 95-101, 110-116, 134-148, 150-156, 158-164, 188-193, 197-209, 226-241, 247-254, 291-297, 312-319, 338-346, 351-358, 366-378, 404-410, 420-438, 448-454, 465-473, 482-488, 490-498, 503-510, 512-519, 531-543, 547-554, 568-575, 589-604, 610-631 and 239-308 of Seq ID No 179; 16-29, 35-47, 50-68, 70-79, 91-101, 143-149, 158-163, 185-191, 196-206, 215-224, 230-237, 244-251, 258-278, 290-311, 319-325, 338-351, 365-385, 396-429, 445-454, 458-466, 491-499, 501-521, 17-79 and 218-233 of Seq ID No 180; 4-10, 16-41, 46-66, 77-84, 91-97, 102-118, 125-144, 187-200, 202-214, 245-253, 255-261, 286-295, 300-330, 335-342, 350-361, 363-381, 385-392, 396-416, 435-450 and 460-470 of Seq ID No 181; 11-19, 27-48, 52-59, 77-82, 84-107, 118-125, 127-154, 178-183, 192-209, 215-221, 286-295, 302-313, 350-357, 402-415, 417-431, 453-463, 465-493 and 313-331 of Seq ID No 182; 19-26, 30-43, 47-55, 63-68, 72-80, 97-104, 107-119, 129-146, 160-175, 194-216, 231-251, 254-260 and 26-43 of Seq ID No 183; 7-13, 29-37, 65-81, 110-120, 123-131, 135-152, 230-249, 254-260, 284-290, 292-299, 317-326, 329-336, 403-444, 452-458, 466-477, 490-498, 510-519, 541-550, 557-566 and 533-567 of Seq ID No 184; 5-47, 71-77, 79-86, 89-95, 120-126, 137-144, 176-181, 184-196, 202-208, 211-232, 236-282, 301-313, 317-325, 341-347, 353-384, 394-400, 412-433, 436-443 and 59-75 of Seq ID No 185; 4-18, 22-38, 59-69, 106-112, 116-130, 138-149, 156-170, 175-197, 200-214, 216-223, 233-244, 255-261, 266-276, 279-286, 325-333, 342-348, 366-399, 402-420, 429-441, 1-104 and 130-147 of Seq ID No 186; 50-58, 69-95, 97-113, 131-136, 157-163, 170-175, 188-212, 220-226, 254-259, 265-277, 283-289, 297-308, 311-318, 347-358, 360-369, 378-401, 416-421, 440-450, 454-462, 470-476, 493-502, 506-514, 536-567, 585-590, 598-607, 613-618, 653-659 and 35-46 of Seq ID No 187; 16-29, 32-60, 65-87, 89-123, 128-134, 137-158, 162-173, 178-196, 210-216, 218-228 and 206-225 of Seq ID No 188; 10-20, 26-35, 51-64, 86-91, 94-100, 113-122, 154-160, 185-191, 193-201, 211-217, 225-230, 237-246, 251-257, 298-304, 306-312, 316-328, 340-348, 357-389, 391-397, 415-421, 449-456, 458-471, 488-495, 502-511, 24-55 and 236-341 of Seq ID No 189; 5-22, 41-51, 87-93, 114-122, 127-136, 150-156, 158-166, 223-233, 245-263, 291-296, 9-126 and 127-285 of Seq ID No 190; 30-43, 46-56, 61-70, 72-83, 85-93, 103-113, 119-125, 151-166, 179-191, 212-218, 225-231, 236-243, 262-267, 291-307, 331-344, 349-355, 366-372, 380-386, 414-422, 428-447, 459-464, 469-478, 507-519, 525-544, 563-569, 576-590, 620-626, 633-643, 654-659, 665-671, 684-707, 717-723, 725-733, 747-779, 782-801 and 347-361 of Seq ID No 191; 4-12, 14-26, 37-80, 107-115, 133-139, 144-150, 154-165, 173-180, 191-199, 205-211, 221-231, 237-244, 254-284, 307-340, 342-353, 360-368, 370-380, 479-493, 495-503, 509-522, 525-536, 539-547, 554-560, 565-573, 578-583, 7-23 and 465-479 of Seq ID No 192; 4-17, 47-55, 76-83, 85-100, 104-112, 117-123, 126-135, 142-148, 156-167, 174-182, 267-273 and 258-283 of Seq ID No 193; 8-32, 36-42, 65-88, 102-108, 112-140, 147-163, 170-179, 183-193 and 117-124 of Seq ID No 194; 12-18, 45-50, 62-77, 82-95, 99-113, 115-123, 125-147, 155-177, 187-209, 211-223, 244-253, 259-270, 278-297, 302-307, 311-318, 329-334, 350-356, 359-365, 390-400, 402-413 and 333-350 of Seq ID No 195; 4-13, 15-27, 30-46, 53-58, 68-74, 82-95, 115-126, 134-139, 148-153, 159-176, 182-199, 201-217, 220-225, 227-235, 237-248, 253-266, 300-315, 322-336, 390-396, 412-426, 438-445, 448-459, 477-484, 502-508, 515-527, 529-537, 553-568, 643-651, 658-667, 690-703 and 376-400 of Seq ID No 196; 4-10, 24-32, 38-55, 59-67, 70-77, 80-87, 89-97, 123-129, 134-151, 166-172, 178-189, 191-216, 218-235, 245-259, 271-315, 326-339, 341-360 and 73-94 of Seq ID No 197; 13-25, 31-3, 43-57, 79-85, 92-99, 106-112, 117-128, 130-139, 146-158, 160-175, 194-204, 211-222, 225-232, 234-242, 263-270, 278-292, 299-320, 322-333 and 240-256 of Seq ID No 198; 4-17, 55-63, 66-101, 109-131, 135-143, 145-151, 155-161, 164-170, 177-185, 192-198, 213-218, 223-238, 246-256, 258-268, 273-283, 309-314, 322-328 and 195-221 of Seq ID No 199; 13-24, 31-39, 41-50, 63-69, 90-96, 104-109, 116-141, 148-153, 161-167, 173-178, 190-209, 253-258, 265-272, 279-289, 295-312, 317-343, 355-366, 376-389, 400-407, 430-451, 453-464, 466-472, 487-493, 499-505, 523-538, 554-559, 568-579, 584-01 and 344-363 of Seq ID No 200; 5-22, 30-36, 53-59, 61-70, 82-92, 99-106, 120-131, 135-148, 154-167, 169-183, 187-199, 204-212, 231-247 and 111-249 of Seq ID No 201; 17-36, 40-66, 71-144, 148-171, 173-191, 199-214, 220-252, 265-272, 278-288, 298-333, 342-385 and 287-307 of Seq ID No 202; 4-16, 22-28, 30-36, 42-48, 95-116, 154-162, 164-174, 239-252, 258-263, 273-285, 306-313, 323-333, 341-357, 363-369, 372-379, 395-401, 430-436, 438-453, 464-480, 33-44, 233-258 and 349-369 of Seq ID No 203; 4-21, 30-37, 46-53, 59-68, 80-92, 98-104, 118-143, 150-160, 165-185, 187-200, 204-211, 224-236, 241-246, 252-258, 271-280, 288-294, 311-320, 335-341 and 191-350 of Seq ID No 204; 4-16, 37-59, 64-70, 79-87, 93-102, 107-127, 143-165, 172-188, 197-204, 207-218, 221-227, 242-248, 258-277, 289-296, 298-316, 332-338, 344-365, 367-373, 375-382, 400-408, 415-425, 438-446 and 235-250 of Seq ID No 205; 4-37, 39-66, 84-98, 101-127, 140-149, 157-163, 166-172, 175-182, 184-193, 203-208, 215-232, 234-247, 250-299, 303-345 and 183-204 of Seq ID No 206; 10-20, 41-61, 73-87, 112-141, 176-192, 194-201, 205-222, 230-237, 257-264, 276-282, 284-310, 312-318, 330-337, 349-357 and 304-328 of Seq ID No 207; 4-31, 42-103, 105-113, 121-153, 160-181, 188-196, 210-226, 231-264, 272-287, 297-304, 328-336 and 304-318 of Seq ID No 208; 21-43, 46-52, 54-70, 72-79, 94-107, 133-141, 160-166, 217-253, 311-317, 359-365, 374-381, 390-395, 434-440, 488-494, 497-502, 511-522, 554-563, 565-574, 577-585, 591-598, 601-606, 617-625, 633-643, 658-664, 676-682, 694-702, 710-719, 754-760, 782-788, 802-808, 916-921, 942-948, 955-964, 973-979, 992-998, 1006-1011, 1016-1023, 1030-1038, 1046-1053, 1059-1066, 1088-1098, 1119-1126, 1129-1135, 1156-1171, 1173-1181, 1202-1210, 1255-1261, 1268-1280, 1295-1310, 1312-1320, 1375-1381, 1406-1417, 1450-1471, 1478-1492, 1498-1506, 1569-1578, 1603-1608, 1611-1624, 1648-1655, 1663-1670, 1680-1698, 1702-1707, 1713-1719, 1737-1742, 1747-1753, 1762-1769, 1771-1785, 1790-1804, 1811-1818, 1830-1836, 1838-1852, 1874-1886, 1893-1899, 1902-1909, 1942-1948, 1952-1962, 1980-1986, 2001-2017, 2020-2028, 2042-2050, 2052-2068, 2074-2079, 2083-2095, 2107-2113, 2147-2155, 2177-2194, 2203-2211, 2236-2241, 2251-2258, 2267-2274, 2285-2292, 2314-2328, 2330-2340, 2358-2365, 2390-2401, 2408-2418, 2432-2453, 2463-2476, 2486-2507, 2528-2537, 2540-2548, 2552-2558, 2568-2576, 2596-2601, 2610-2622, 2629-2638, 2653-2669, 2718-2727, 2749-2767, 2777-2784, 2789-2795, 2806-2815, 2817-2824, 2835-2843, 2847-2854, 2860-2881, 511-523, 612-630 and 1790-1803 of Seq ID No 209; 4-54, 61-68, 72-82, 86-93, 100-108, 115-130, 147-154, 187-194, 196-207, 224-229, 236-251, 275-287 and 96-109 of Seq ID No 210; 31-39, 62-69, 91-101, 158-172, 175-180, 186-193, 201-208, 210-223, 243-250, 273-286, 293-299, 319-325, 343-354, 356-365, 368-384, 414-435, 471-491, 512-518, 550-556, 567-581, 584-589, 633-639, 680-692, 697-708, 716-721, 747-754, 779-786, 810-816 and 366-503 of Seq ID No 211; 5-20, 22-48, 57-65, 96-101, 111-122, 130-145, 154-164, 170-181, 193-199, 201-216, 224-241, 244-262, 281-323, 342-351, 359-367, 369-396, 406-416, 424-433, 450-456, 485-491, 493-499, 501-515, 517-535 and 289-305 of Seq ID No 212; 4-17, 22-44, 53-60, 66-83, 87-94, 101-106, 110-116, 131-137, 148-183, 189-207, 209-215, 233-242, 251-262, 264-272, 290-296, 308-327, 359-373, 375-380, 397-405, 415-420, 426-433, 444-475, 478-484, 529-536, 548-558 and 106-126 of Seq ID No 213; 4-38, 42-50, 58-64, 72-81, 92-118, 140-146, 157-165, 172-192, 198-204, 208-216, 227-234, 238-258, 271-278, 288-293, 311-322, 327, 346, 357-370, 375-383, 395-409, 411-417, 425-432, 436-445, 109-129 and 370-380 of Seq ID No 214; 23-30, 36-49, 52-64, 86-94, 97-104, 121-129, 257-272, 279-286, 288-294, 307-327, 334-340, 369-375, 377-386, 406-412, 418-423, 430-438, 441-447, 459-465, 469-476, 482-488, 510-546, 550-580, 584-622, 638-645, 653-659, 675-63, 692-705, 723-731, 752-761, 788-795 and 572 of Seq ID No 215; 11-33, 36-46, 88-104, 116-126, 134-170, 189-195, 199-217, 225-250, 255-261, 266-273, 280-291, 296-313, 334-341, 343-349, 354-360, 362-369, 373-380, 387-401, 406-420 and 259-273 of Seq ID No 216; 9-14, 28-44, 57-64, 72-79, 86-93, 104-111, 116-126, 142-150, 159-164 and 61-86 of Seq ID No 217; 10-17, 26-33, 43-61, 69-95, 101-107, 109-125, 129-135, 137-144, 147-153, 158-169, 177-187, 209-219, 221-232, 235-247, 261-268, 271-282, 296-302, 306-347, 355-362, 364-379, 386-399, 409-418, 424-442, 451-460, 467-479, 490-498 and 60-74 of Seq ID No 218; 8-14, 20-31, 65-84, 94-99, 154-179, 193-207, 238-253 and 96-118 of Seq ID No 219; 4-24, 30-44, 47-62, 84-93, 108-116, 124-133, 136-141, 201-209, 217-223, 228-235, 238-245, 247-270, 275-285, 290-314, 328-338, 342-349, 353-365, 375-383, 386-392, 394-402, 417-427, 443-459, 465-481, 492-514, 516-524, 550-566, 602-617, 630-639, 666-676, 687-693, 719-730, 747-753, 783-790, 799-816, 824-831, 837-842 and 167-189 of Seq ID No 220; 6-15, 18-28, 58-66, 84-101, 106-129, 136-151, 154-165, 182-203, 205-211, 214-220, 222-228, 233-240, 251-260, 270-277, 284-291, 306-315, 322-328, 363-369, 378-388, 392-405, 443-452, 495-501, 512-523, 574-583 and 362-375 of Seq ID No 221; 5-25, 27-34, 47-59, 64-70, 76-86, 145-158, 166-183, 189-202, 217-231, 235-242, 260-270, 278-309 and 1-102 of Seq ID No 222; 4-19, 24-76, 78-83, 90-99, 102-109, 114-122, 137-147, 154-174, 177-188, 203-212, 217-223, 227-239 and 226-325 of Seq ID No 223; 7-37, 71-90, 94-109, 117-128, 141-153, 179-192, 199-206, 225-231, 237-243, 258-264 and 40-51 of Seq ID No 224; 13-19, 25-30, 46-59, 75-91, 101-107, 114-124, 129-135, 137-145, 160-167, 171-179, 187-194, 209-215, 217-222, 229-239, 243-249, 257-265, 269-275, 299-308, 310-327 and 282-300 of Seq ID No 225; 86-100, 216-230, 342-369, 382-388, 424-430, 438-445, 452-458, 488-494, 501-518, 554-560, 568-574, 584-592, 603-609, 611-629, 639-645, 652-661, 669-699, 708-714, 726-738, 747-753, 763-775, 785-791, 794-807, 815-824, 826-845, 854-860, 863-868, 870-883, 892-898, 901-906, 909-921, 930-937, 946-959, 968-974, 977-990, 998-1007, 1009-1027, 1037-1043, 1046-1051, 1053-1066, 1075-1081, 1084-1089, 1092-1103, 1113-1119, 1122-1135, 1143-1152, 1154-1172, 1182-1188, 1191-1196, 1200-1210, 1220-1226, 1229-1235, 1237-1249, 1259-1265, 1268-1281, 1289-1298, 1305-1318, 1328-1334, 1337-1343, 1345-1357, 1367-1373, 1390-1396, 1405-1411, 1418-1423, 1426-1435, 1445-1455, 1474-1483, 1493-1500, 1505-1512, 1517-1524, 1538-1544, 1568-1578, 1595-1601, 1674-1682, 1687-1720, 1728-1736, 1738-1744, 1754-1761, 1764-1774, 1798-1824, 1836-1842, 1886-1893, 1895-1903, 366-781, 782-1518 and 1731-1747 of Seq ID No 226; 4-17, 20-39, 46-55, 60-66, 102-110, 114-122, 125-131, 161-167, 172-178, 185-190, 195-202, 218-232, 236-252, 264-291, 293-302, 309-315, 324-339 and 169-381 of Seq ID No 227; 5-10, 13-40, 42-53, 69-75, 83-89, 120-135, 150-161, 174-190, 203-225, 229-247, 257-287, 318-348 and 30-200 of Seq ID No 228; 7-19, 43-53, 64-72, 124-139, 52-84 and 120-131 of Seq ID No 229; 12-19, 39-48, 58-100, 117-123, 154-162, 164-187, 189-195, 202-216, 218-235, 241-246, 262-278, 315-328, 333-347, 354-366, 372-379, 391-405, 422-429, 431-442, 444-450, 458-466, 478-485, 494-501, 504-510, 520-535, 573-580, 589-598, 615-625, 666-676, 686-698, 722-729, 737-746, 756-767, 787-796, 805-816, 824-829, 833-848, 856-864, 866-876, 879-886, 898-904, 918-924, 927-934, 941-960, 967-978 and 561-575 of Seq ID No 230; 11-29, 49-55, 70-77, 84-100, 102-112, 148-155, 160-177, 181-204 and 1-104 of Seq ID No 231; 27-44, 64-71, 122-133, 151-156, 164-178, 214-220, 226-232, 235-244, 253-262, 282-288, 294-310, 317-325, 350-356, 362-368, 376-383, 438-443, 449-454, 459-464, 492-498, 500-511, 529-535, 538-546, 567-573, 597-603, 660-665, 674-679, 724-734, 763-769, 773-784, 791-801, 807-815, 821-826, 840-848, 863-868, 897-902, 908-928, 932-953, 956-975, 980-987, 990-996, 1012-1018, 1042-1063, 1095-1116, 1149-1157, 1160-1167, 110-357, 358-501 and 502-1161 of Seq ID No 232; 4-21, 64-71, 73-84, 128-138, 144-162, 203-217, 240-263, 288-298, 300-308, 310-317, 325-351, 369-380, 391-411 and 330-345 of Seq ID No 233; 5-11, 25-31, 39-48, 51-79, 89-98, 100-122, 135-148, 166-201, 203-227, 230-250, 254-260, 266-272, 274-282, 299-305, 328-337 and 31-4 of Seq ID No 234; 12-23, 29-48, 51-60, 66-72, 75-81, 83-93, 103-115, 133-148, 168-174, 195-204, 222-229, 231-240, 242-251, 270-280, 286-305, 322-344, 349-360, 364-370, 378-400, 421-441, 448-484, 486-493, 495-501, 504-534, 547-561, 567-590, 597-607, 621-635, 643-649, 658-685, 688-694, 702-711, 717-731, 737-742, 759-765, 767-772, 776-786, 803-809, 815-825, 854-908, 910-919, 923-930, 942-948, 961-975, 994-1014 and 915-940 of Seq ID No 235; 4-9, 32-47, 51-61, 75-96, 139-191 and 1-124 of Seq ID No 236; 4-13, 17-38, 43-49, 55-76, 88-95, 110-121, 128-146, 151-157, 162-214, 222-240, 243-249, 251-273, 275-281, 292-298, 300-309, 312-320, 322-331, 355-369, 376-408, 446-460, 471-482, 485-509 and 191-203 of Seq ID No 237; 4-21, 72-82, 89-103, 106-115, 118-124, 140-146, 174-184, 191-200, 204-213, 218-224, 261-266, 282-293, 299-309, 311-340, 342-358, 362-372, 381-389, 391-402, 413-421, 438-447, 457-464, 470-478, 501-507, 545-560, 578-624, 631-641, 658-670, 680-689, 717-738, 753-759, 795-805, 816-822, 830-838, 842-848, 869-881, 892-898, 33-51 and 818-835 of Seq ID No 238; 4-21, 79-85, 156-177, 183-188, 206-214, 243-249, 261-269, 287-292, 315-322, 334-345, 360-366, 374-390, 402-411, 37-97 and 260-399 of Seq ID No 239; 4-9, 19-54, 58-78, 97-104, 111-120, 126-134, 137-145, 163-173, 178-188, 193-203, 211-224, 246-286, 288-324, 337-346, 355-362, 374-390, 392-398, 409-417 and 240-249 of Seq ID No 240; 5-12, 14-31, 35-41, 43-61, 82-92, 97-105, 134-145, 155-166, 184-203, 215-223, 225-251, 272-279, 281-306, 310-345, 358-418, 435-473, 482-490, 525-532, 538-547, 549-563, 578-604, 613-639 and 144-154 of Seq ID No 241; 53-59, 64-72, 74-100, 133-152, 154-172, 176-181, 207-214, 225-238, 275-297, 304-310, 331-340, 362-367, 384-395, 403-410, 437-443, 448-456, 482-490, 579-597, 602-610, 625-630, 633-651, 699-707, 709-715, 734-743, 750-762 and 544-685 of Seq ID No 242; 12-18, 22-40, 45-83, 89-97, 103-109, 147-153, 159-173, 195-204, 210-219, 243-253, 259-265, 273-282, 303-309, 315-325, 332-340, 346-358, 362-37, 377-390, 393-402, 418-426, 447-455, 467-480, 505-512, 514-525, 548-561, 566-576, 584-596, 619-626, 638-645, 649-659, 661-680, 699-708, 714-720, 753-759, 766-772, 775-781, 801-808, 202-218, 282-299, 339-350 and 617-628 of Seq ID No 243; 5-33, 52-62, 87-101, 111-135, 137-143, 145-152, 190-202, 209-221, 233-245, 253-270 and 151-215 of Seq ID No 244; 19-29, 32-39, 42-48, 75-94, 124-135, 137-145, 152-160, 176-182, 193-203, 215-236, 266-273, 275-291, 297-306, 311-319, 322-342, 348-360, 369-378, 394-401 and 48-64 of Seq ID No 245; 4-11, 13-33, 36-43, 53-63, 65-80, 112-129, 134-141, 143-155, 157-168, 178-188, 191-199, 201-207, 215-229, 242-255, 263-270, 283-315, 320-329, 333-338, 340-349, 412-426, 465-478, 455-490, 498-512, 540-554 and 390-516 of Seq ID No 246; 4-18, 23-32, 41-47, 54-70, 88-99, 104-111, 118-138, 143-148, 150-162, 168-175, 181-188, 203-211, 214-220, 227-245, 251-268, 275-281, 287-296, 323-333 and 1-90 of Seq ID No 247; 8-34, 38-49, 72-83, 85-91, 94-104, 112-125, 134-142, 148-168, 181-189, 191-198, 202-214, 222-233, 242-254, 256-262, 273-278, 287-294, 314-325 and 141-159 of Seq ID No 248; 4-24, 30-36, 47-75, 82-105, 124-134, 151-157, 192-202, 208-214, 219-226, 234-247, 285-290, 318-324, 332-340, 343-349, 380-386, 453-462, 472-478, 484-501, 531-540, 550-557, 604-612, 620-625, 642-648, 652-671, 64-84, 93-180 and 181-446 of Seq ID No 249; 12-18, 24-32, 68-75, 77-83, 96-101, 109-116, 129-136, 152-164, 175-184, 190-199, 206-215, 224-233, 241-250, 258-264, 273-292, 302-312, 319-331, 334-346, 348-368, 387-395, 408-416, 420-429, 437-452 and 364-374 of Seq ID No 250; 11-28, 36-52, 60-67, 74-79, 108-116 and 61-76 of Seq ID No 251; 20-27, 38-49, 69-74, 84-107, 138-145, 161-168, 179-195, 210-226, 228-252, 267-281, 283-296, 305-311, 333-340, 342-356, 361-372, 380-399, 401-414, 458-466, 475-481, 492-507, 515-520 and 146-160 of Seq ID No 252; 43-61, 68-74, 76-90, 120-128, 130-149, 156-161, 164-182, 206-234, 242-252, 269-274, 291-304, 332-345, 349-355, 360-371, 374-388, 434-440, 447-453, 459-465, 469-496, 504-522 and 261-285 of Seq ID No 253; 4-17, 24-30, 37-49, 87-98, 118-124, 126-136, 144-171, 176-188, 206-214, 216-228, 233-240, 246-252, 262-271, 277-297, 307-330, 333-342, 346-352, 355-361, 368-386, 391-400, 413-420, 474-480 and 401-427 of Seq ID No 254; 15-26, 31-46, 51-72, 80-93, 96-109, 131-137, 150-158, 179-185, 189-209, 211-219, 221-234, 241-247, 255-262, 265-271, 283-288 and 173-190 of Seq ID No 255; 28-37, 39-45, 51-58, 77-84, 89-97, 132-148, 171-180, 199-205, 212-218, 220-226, 257-265, 273-300, 307-327, 334-340, 344-365, 385-390, 402-408, 426-436, 450-468, 476-485 and 425-497 of Seq ID No 256; 4-25, 70-76, 80-88, 90-100, 120-128, 162-169, 183-203, 261-277, 279-289, 291-297, 302-308, 321-327, 339-353, 358-377, 392-401, 404-410, 414-422, 443-450, 456-461, 470-488, 490-497, 510-535, 570-611, 618-630, 639-647, 649-660, 668-690, 702-716, 718-724, 737-747, 750-764 and 497-509 of Seq ID No 257; 12-48, 50-64, 99-108, 216-223, 235-241, 244-254, 262-274, 287-293, 310-316, 320-326, 361-366, 377-383, 390-395, 408-414, 418-425, 438-444, 462-469, 494-505, 524-530, 536-547, 551-566, 592-598, 601-613, 678-685, 687-695, 709-717, 727-737, 751-757, 760-765, 772-778, 782-788, 801-807, 822-830, 859-868, 870-878, 884-890, 898-903, 909-919, 953-969, 973-980, 990-1000, 1002-1019, 1041-1047, 1059-1065, 1090-1095, 1116-1127, 1130-1139, 1143-1149, 1151-1168, 1178-1183, 1188-1195, 1197-1209, 1213-1220, 1226-1234, 1236-1247, 1255-1274, 1276-1282, 76-100, 270-284, 309-438, 493-505, 786-942 and 947-967 of Seq ID No 258; 4-9, 24-34, 46-95, 97-109, 119-130 and 138-156 of Seq ID No 259; 9-26, 28-35, 43-53, 55-68, 83-92, 99-105, 110-135, 139-149, 157-162, 164-170, 173-183, 193-208, 210-230, 239-245, 253-259, 263-271, 293-305, 310-320, 322-331, 336-343, 351-364, 367-376, 92-107 and 154-173 of Seq ID No 260; 19-39, 52-62, 108-117, 145-152, 160-168, 194-203, 229-240, 252-268, 280-287, 308-316, 333-339, 383-390, 403-412, 414-424, 438-445, 464-472, 479-484, 489-505, 510-526 and 247-260 of Seq ID No 261; 5-17, 25-52, 60-77, 105-113, 118-125, 162-167, 228-234, 272-279, 328-334, 341-357, 381-395, 400-406, 512-518, 557-569, 586-592, 645-651, 690-695, 701-709, 720-726, 733-743, 751-758, 781-786, 879-886, 929-934, 939-944, 952-960, 965-975, 994-1001, 1039-1045, 1102-1109, 1164-1181, 1198-1206, 1223-1229, 1253-1259, 1283-1292, 1312-1317, 1339-1349, 1360-1370, 1389-1398, 1400-1412, 1452-1465, 1470-1484, 1490-1497, 1519-1525, 1554-1564, 1578-1591, 1623-1636, 1638-1646, 1669-1679, 1685-1697, 1704-1711, 1713-1720, 1730-1736, 1738-1749, 1756-1764, 1778-1786, 1796-1803, 1817-1826, 1849-1866, 1975-1993, 2017-2032, 2044-2053, 2070-2086, 2091-2109, 2116-2127, 2156-2167, 2182-2188, 2197-2202, 2244-2252, 2281-2287, 2290-2307, 2350-2361, 2383-2404, 2425-2433, 2445-2455, 2495-2505 and 394-549 of Seq ID No 262; 9-24, 31-53, 57-67, 69-79, 84-114, 133-141, 144-172, 178-186 and 13-46 of Seq ID No 263; 4-25, 27-35, 43-52, 59-70, 79-91, 115-130, 136-152, 154-163, 170-179 and 1-58 of Seq ID No 264; 4-30, 49-55, 71-80, 96-105, 111-126, 139-146, 149-162, 239-245, 279-285, 290-296, 300-307, 331-337, 343-350 and 250-351 of Seq ID No 265; 9-27, 34-41, 43-51, 92-111, 114-120, 123-131, 139-150, 156-171, 176-186, 188-204, 229-241, 252-258, 266-279, 288-297, 319-334, 338-348, 373-379, 389-398, 431-439, 479-484 and 214-398 of Seq ID No 266; 4-15, 18-27, 47-52, 68-83, 91-97, 104-110, 115-121, 139-147, 157-164, 198-206, 227-236, 241-254, 264-273, 278-289, 311-320, 353-361, 372-383, 405-420, 426-434 and 232-386 of Seq ID No 267; 4-10, 24-34, 91-97, 129-141, 156-163, 184-190, 205-219, 229-235, 256-273, 278-285 and 93-116 of Seq ID No 268; 7-29, 35-54, 71-83, 85-91, 104-111, 122-134, 138-144, 146-154, 158-174, 177-183, 186-201, 207-215, 223-235, 240-247, 262-273, 275-283, 287-292 and 48-66 of Seq ID No 269; 7-27, 31-47, 49-70, 75-102, 110-149, 157-171, 217-223, 235-251, 294-302, 358-364, 367-375, 387-393, 395-412, 423-430, 441-451, 456-470, 472-486, 488-495, 499-509, 515-529, 536-549, 556-570, 574-603, 607-615, 625-633, 642-658, 670-676, 683-702, 708-716, 720-726, 747-756, 763-784, 803-812, 815-826 and 475-490 of Seq ID No 270; 7-22, 30-38, 53-59, 64-75, 83-95, 97-112, 120-131, 133-142, 145-151, 154-166, 172-180, 189-203, 227-238, 277-287, 9-156 and 174-287 of Seq ID No 271; 13-23, 25-32, 111-117, 150-164, 185-193, 207-212, 216-224, 230-236, 263-272, 304-311, 342-348, 374-385, 391-407, 444-458, 480-487, 489-499, 523-542, 544-558, 572-579, 620-640, 686-696, 703-710, 742-755, 765-772, 817-822, 830-837, 865-872, 931-937 and 66-86 of Seq ID No 272; 4-27, 49-56, 62-70, 86-92, 121-127, 151-163, 170-182, 195-202, 212-226, 237-243 and 234-254 of Seq ID No 273; 4-10, 13-24, 39-51, 62-78, 92-104, 107-117, 134-141, 156-161, 166-181, 210-216, 222-229, 256-266, 273-280, 297-304, 313-330, 336-349, 371-376, 433-439, 443-448, 488-493, 506-515, 527-534, 560-572, 575-583, 587-593 and 252-483 of Seq ID No 274; 4-15, 21-38, 45-56, 81-95, 102-108, 118-130, 133-147, 152-162, 166-171, 199-204, 211-218, 230-240, 253-261, 274-283, 288-294, 312-317, 325-336, 344-357, 391-414 and 24-146 of Seq ID No 275; 26-31, 38-56, 65-82, 90-101, 112-119, 123-153, 175-188, 197-216, 234-242, 249-265, 273-286, 290-305, 327-335, 338-346, 361-372, 394-404 and 290-306 of Seq ID No 276; 17-26, 43-48, 50-73, 81-93, 95-107, 139-146, 158-168, 171-176, 190-196, 202-212, 216-223, 243-266, 274-282, 308-313, 324-330, 344-378, 380-387, 403-422, 427-443, 448-455, 457-465, 491-515, 517-528, 553-567, 589-599, 610-617, 642-648, 670-697, 709-717, 726-743, 745-759, 769-803, 807-823, 840-849 and 820-851 of Seq ID No 277; 4-18, 39-48, 53-63, 66-90, 102-117, 125-134, 137-145, 156-162, 169-197, 26-40 and 56-80 of Seq ID No 278; 21-33, 36-42, 49-60, 68-76, 91-105, 123-130, 141-161, 169-178, 185-190, 192-199, 205-214, 223-233, 239-247, 260-269, 284-293, 300-314, 324-352, 357-364, 373-382, 389-403, 420-432, 438-446, 466-471, 477-484, 503-509, 549-556, 558-576, 600-623, 625-635, 654-661, 663-669, 671-687, 702-716, 735-741, 744-750, 757-766, 776-786, 807-815, 824-832, 854-860, 863-897, 909-915, 920-946, 952-959, 982-997, 1024-1038, 1049-1055, 1071-1085, 1104-1113, 1121-1132, 1138-1150, 1187-1196, 1212-1221, 1227-1236, 1257-1262, 1264-1278, 1282-1294, 1307-1318, 1353-1370, 1382-1388, 1396-1409, 1434-1440, 1446-1454, 1465-1478, 1485-1513, 1516-1529, 1540-1545, 1563-1568, 1575-1593, 1607-1616, 1628-1645, 1648-1661, 1676-1682, 1689-1697, 1713-1719, 1739-1749, 1753-1758, 1763-1774, 1797-1803, 1807-1846, 1855-1874, 1877-1891, 1893-1907, 1912-1925, 1931-1943, 1955-1965, 1976-1990, 2032-2043, 2045-2051, 2099-2105, 2131-2138, 2161-2179, 2188-2199, 2205-2216, 2219-2227, 2235-2245, 2247-2267, 2277-2288, 2294-2304, 2314-2326, 2346-2358, 2365-2377, 2383-2402, 2407-2423, 2437-2450, 2454-2473, 2489-2497, 2525-2531, 2557-2570, 2580-2587, 2589-2599, 2621-2641, 2647-2653, 2661-2677, 2685-2690, 2697-2717, 2722-2733, 2739-2777, 2786-2793, 2801-2808, 2811-2822, 2825-2835, 2838-2845, 2859-2871, 2877-2883, 213-344, 954-1080 and 2524-2733 of Seq ID No 279; 10-16, 18-23, 28-41, 63-69, 77-91, 101-109, 118-136, 146-153, 155-162, 168-179, 192-207, 217-226, 229-235, 239-254, 279-286, 294-307, 313-319, 334-341, 344-353, 363-377, 390-396 and 178-328 of Seq ID No 280; 18-42, 68-84, 89-95, 100-105, 107-115, 125-135, 154-177, 189-195, 205-228, 236-243, 252-259, 279-300, 309-316, 323-331, 340-351, 353-364, 377-402 and 85-97 of Seq ID No 281; 4-18, 26-32, 66-76, 100-126, 151-159, 178-186, 188-194, 200-210, 241-248, 253-259, 262-279, 284-291, 307-313, 315-322, 327-337, 376-386, 399-407, 432-441, 467-473, 487-497, 499-505, 543-549, 560-568, 585-593, 598-604, 608-614, 630-642, 647-653, 690-703, 717-730, 21-200 and 468-480 of Seq ID No 282; 17-49, 52-58, 62-73, 78-97, 100-117, 122-172, 185-190, 193-217, 225-236 and 33-42 of Seq ID No 283; 7-39, 50-58, 73-89, 96-107, 109-120, 126-142, 152-170, 178-202, 205-211, 224-244, 249-259, 261-270, 300-310, 312-325 and 158-169 of Seq ID No 284; 4-31, 40-64, 71-82, 85-92, 102-124, 126-139, 147-152, 159-173, 176-188, 195-207, 210-216, 234-241, 249-256, 258-276, 279-293, 296-302, 310-315, 349-356, 363-378, 380-403, 411-426, 435-441, 448-459, 463-476, 488-494 and 201-221 of Seq ID No 285; 5-13, 15-74, 87-104, 107-120, 123-129, 136-145, 150-191, 193-206, 227-248, 250-264, 278-302, 304-323, 332-378, 384-407, 409-419, 425-457, 462-471, 474-497, 511-545, 555-564, 571-578, 585-598, 640-647, 669-675, 682-691, 693-705, 729-743, 752-761, 772-780, 786-804, 808-818, 822-846, 858-880, 884-900, 910-939, 941-947, 962-971, 973-988, 998-1003, 1007-1027 and 236-259 of Seq ID No 286; 4-19, 27-68, 81-111, 121-160 and 60-79 of Seq ID No 287; 4-37, 40-46, 52-57, 199-205, 222-229, 236-244, 250-267, 269-282 and 27-197 of Seq ID No 288; 4-16, 24-30, 32-38, 63-75, 86-92, 98-111, 113-126, 160-165, 170-180, 198-204, 227-233, 239-245, 253-273, 308-314, 352-365, 382-387, 395-403, 423-429, 472-482, 484-493, 501-507, 518-526, 536-541, 543-550, 556-562, 586-600, 626-33, 649-661, 680-688 and 546-559 of Seq ID No 289; 16-33, 48-59, 63-71, 77-92, 94-109, 117-124, 139-151, 169-181, 184-227, 233-249, 251-261, 263-275, 282-294, 297-321, 326-332, 341-355, 383-399 and 258-272 of Seq ID No 290; 11-26, 31-39, 43-52, 55-62, 64-70, 80-94, 123-133, 135-141, 172-181, 185-206, 209-218, 224-230, 238-244, 251-262, 264-271, 290-301, 306-324, 333-340, 350-357, 367-375, 390-397, 434-441, 443-448, 77-226 and 350-429 of Seq ID No 291; 4-13, 22-27, 31-45, 50-59, 72-96, 99-114, 131-141, 143-150, 159-176, 180-186, 189-198, 208-214, 234-253, 271-287, 294-299, 310-366, 382-390, 398-416, 424-443 and 283-305 of Seq ID No 292; 9-26, 30-53, 62-72, 86-95, 112-122, 136-145, 153-160, 209-221, 227-237, 241-268, 281-288, 291-298, 308-314, 321-328, 336-346, 351-379, 388-397, 409-416, 423-433, 443-481, 511-519 and 213-232 of Seq ID No 293; 12-18, 25-31, 38-50, 59-67, 71-82, 96-126 and 76-88 of Seq ID No 294; 4-25, 39-44, 64-71, 74-88, 100-113, 128-138, 151-162, 164-177, 185-190, 204-213, 233-239, 246-254, 281-286, 293-306, 309-318, 333-347, 349-359, 385-398, 404-423, 458-465, 477-484, 490-499, 501-533, 554-566, 582-590, 596-616, 624-629, 631-639, 654-680, 694-720, 735-743 and 2-100 of Seq ID No 295; 4-16, 36-41, 52-75, 98-107, 109-117, 122-128, 133-139, 141-155, 159-165, 169-182, 187-193, 195-201, 211-224, 230-236, 247-269, 278-290 and 75-92 of Seq ID No 296; 7-21, 25-33, 37-43, 87-94, 103-120, 131-147, 168-174, 197-203, 207-212, 227-237, 247-257, 263-271, 279-287, 298-306, 320-325, 332-340, 363-374, 379-384, 390-401, 403-414, 428-433, 448-457, 462-475, 483-490, 513-519, 525-535, 543-554, 559-566, 571-620, 625-631, 636-642, 659-670, 688-706, 708-723, 770-779, 787-793, 796-807, 820-840, 848-854, 863-874, 895-905, 912-919, 934-942, 968-975, 983-1000, 1012-1019, 1026-1036, 1050-1060, 1064-1070, 1081-1091, 1094-1108, 1112-1118, 1140-1152, 1164-1169, 1172-1180, 1187-1192 and 732-748 of Seq ID No 297; 23-40, 42-59, 66-73, 78-97, 111-128, 130-141, 157-166, 178-183 and 53-71 of Seq ID No 298; 4-27, 38-44, 47-57, 59-85, 99-106, 114-121, 154-166, 181-186, 193-198, 238-244, 253-262, 272-278, 287-299, 314-320, 338-350, 358-368, 382-388, 407-416, 433-446, 456-461, 463-473 and 86-195 of Seq ID No 299; 5-24, 38-59, 64-80, 87-99, 105-126, 134-142, 149-163, 165-179, 181-202, 205-220, 227-233, 243-250, 257-263 and 87-245 of Seq ID No 300; 5-32, 47-53, 66-79, 81-97, 115-151, 155-174, 183-188, 196-210, 215-226, 230-238, 253-258, 263-270, 276-282, 295-301, 304-325, 334-344, 360-390, 397-412, 425-432, 434-462, 478-494, 508-526, 539-564, 571-579, 347-371 and 375-386 of Seq ID No 301; 4-15, 36-44, 49-56, 60-66, 68-82, 84-103, 109-115, 118-141, 147-154, 160-168, 176-185 and 26-39 of Seq ID No 302; 7-13, 23-33 and 13-21 of Seq ID No 303; 2-10 of Seq ID No 304; 4-9, 12-18, 35-42, 49-62 and 6-18 of Seq ID No 305; 19-25 and 1-13 of Seq ID No 306; 15-21, 27-45 and 12-25 of Seq ID No 307; 14-20 and 1-14 of Seq ID No 308; 4-18 and 13-26 of Seq ID No 309; 8-21 and 2-20 of Seq ID No 310; 4-14 and 4-16 of Seq ID No 311; 3-12 of Seq ID No 312; 6-14, 6-25, 35-57 and 2-14 of Seq ID No 313; 6-25, 35-57 and 17-31 of Seq ID No 314; 14-25, 32-46 and 5-19 of Seq ID No 315; 18-31 and 5-16 of Seq ID No 316; 19-24 and 4-26 of Seq ID No 317; 13-21, 29-34, 47-58, 61-73 and 36-47 of Seq ID No 318; 4-15 and 5-24 of Seq ID No 319; 6-18 of Seq ID No 320; 13-20 and 4-13 of Seq ID No 321; 15-23 of Seq ID No 322; 4-9 and 7-21 of Seq ID No 323; 1-10 of Seq ID No 324; 4-14 of Seq ID No 325; 4-17, 35-41, 46-89, 93-98 and 70-88 of Seq ID No 326; 1-13 of Seq ID No 327; 4-16, 26-32 and 25-38 of Seq ID No 328; 8-15, 23-28 and 4-17 of Seq ID No 329; 4-12 and 1-15 of Seq ID No 330; 4-29, 31-42, 52-58 and 6-16 of Seq ID No 331; 4-9, 24-32 and 9-19 of Seq ID No 332; 4-12, 18-27 and 5-18 of Seq ID No 333; 4-11, 37-56, 58-92 and 18-29 of Seq ID No 334; 8-28 and 20-35 of Seq ID No 335; 4-15 of Seq ID No 336; 4-23, 27-39, 55-63 and 35-58 of Seq ID No 337; 6-26, 28-54 and 28-47 of Seq ID No 338; 4-10, 38-52, 58-82 and 30-49 of Seq ID No 339; 4-22, 29-35, 44-50, 53-68, 70-80 and 20-33 of Seq ID No 340; 22-28, 30-36 and 18-33 of Seq ID No 341; 4-11, 13-21, 25-30 and 20-30 of Seq ID No 342; 10-22 and 10-23 of Seq ID No 343; 4-11 and 9-20 of Seq ID No 344; 14-25, 32-46 and 6-19 of Seq ID No 345; 5-30 and 14-33 of Seq ID No 346; 4-15, 28-35, 46-55, 59-65, 76-84 and 9-24 of Seq ID No 347; 27-33 and 5-19 of Seq ID No 348; 5-13 and 8-18 of Seq ID No 349; 9-22, 24-34 and 21-40 of Seq ID No 350; 4-17, 35-41, 46-89, 93-98 and 71-89 of Seq ID No 351; 4-12, 14-24 and 2-17 of Seq ID No 352; 9-17 and 5-16 of Seq ID No 353; 7-41, 48-58, 63-75, 80-89 and 43-53 of Seq ID No 354; 4-22, 25-30 and 4-14 of Seq ID No 355; 4-55 and 18-33 of Seq ID No 356; 262-280 of Seq ID No 179; 131-146 of Seq ID No 186; 207-224 of Seq ID No 188; 27-50, 203-217 and 313-325 of Seq ID No 189; 110-129 of Seq ID No 192; 156-179, 174-197, 192-215, 210-233, 228-251 and 246-267 of Seq ID No 190; 377-400 of Seq ID No 196; 34-43, 234-257 and 350-367 of Seq ID No 203; 304-327 of Seq ID No 207; 25-48, 43-66 and 61-82 of Seq ID No 222; 398-421, 416-439, 434-457, 452-475, 470-493, 488-511, 506-529, 524-547, 621-644, 639-664, 707-730, 725-748, 743-766, 761-784, 779-802, 797-820, 984-1007, 1002-1025, 1020-1043, 1038-1061, 1056-1079, 1074-1097, 1092-1115, 1286-1309, 1304-1327, 1322-1345, 1340-1363, 1358-1381, 1376-1399, 1394-1417, 1412-1435, 1430-1453, 1448-1471, 1466-1489 and 1484-1507 of Seq ID No 226; 188-211, 206-229, 224-247, 242-265, 260-283 and 278-296 of Seq ID No 227; 56-79 and 122-132 of Seq ID No 229; 35-46 of Seq ID No 231; 178-201, 196-219, 214-237, 232-255, 250-273, 268-291, 379-402, 397-420, 415-438, 433-456, 451-474, 642-65, 660-683, 678-701, 696-719, 714-737, 732-755, 750-773, 768-791, 899-922, 917-940, 935-958, 1037-1060, 1055-1078, 1073-1096 and 1091-1114 of Seq ID No 232; 330-346 of Seq ID No 233; 571-594, 589-612, 607-630, 625-648, 643-666 and 661-684 of Seq ID No 242; 188-207 of Seq ID No 244; 61-84, 308-331, 326-349, 344-367, 362-385, 380-403 and 398-421 of Seq ID No 249; 79-98, 345-366, 844-867, 870-887 and 890-905 of Seq ID No 258; 94-109 of Seq ID No 268; 188-207 of Seq ID No 272; 290-306 of Seq ID No 276; 826-849 of Seq ID No 277; 228-252, 247-270, 265-288, 283-306, 301-324, 955-978, 973-996, 991-1014, 1009-1032, 1027-1050, 1045-1068, 2533-2556, 2551-2574, 2569-2592, 2587-2610, 2605-2628 and 2623-2646 of Seq ID No 279; 86-109 and 104-127 of Seq ID No 288; 546-560 of Seq ID No 289; 260-271 of Seq ID No 290; 106-129, 124-147, 142-165, 160-183, 178-201 and 375-398 of Seq ID No 291; 284-307 of Seq ID No 292; 362-385 of Seq ID No 301.

[0042] The present invention also provides a process for producing a H. pylori hyperimmune serum reactive antigen or a fragment thereof according to the present invention comprising expressing one or more of the nucleic acid molecules according to the present invention in a suitable expression system.

[0043] Moreover, the present invention provides a process for producing a cell, which expresses a H. pylori hyperimmune serum reactive antigen or a fragment thereof according to the present invention comprising transforming or transfecting a suitable host cell with the vector according to the present invention.

[0044] According to the present invention a pharmaceutical composition, especially a vaccine, comprising a hyperimmune serum-reactive antigen or a fragment thereof as defined in the present invention or a nucleic acid molecule as defined in the present invention is provided.

[0045] In a preferred embodiment the pharmaceutical composition further comprises an immunostimulatory substance, preferably selected from the group comprising polycationic polymers, especially polycationic peptides, immunostimulatory deoxynucleotides (ODNs), peptides containing at least two LysLeuLys motifs, especially KLKL5KLK, neuroactive compounds, especially human growth hormone, alumn, Freund's complete or incomplete adjuvants or combinations thereof.

[0046] In a more preferred embodiment the immunostimulatory substance is a combination of either a polycationic polymer and immunostimulatory deoxynucleotides or of a peptide containing at least two LysLeuLys motifs and immunostimulatory deoxynucleotides.

[0047] In a still more preferred embodiment the polycationic polymer is a polycationic peptide, especially polyarginine.

[0048] According to the present invention the use of a nucleic acid molecule according to the present invention or a hyperimmune serum-reactive antigen or fragment thereof according to the present invention for the manufacture of a pharmaceutical preparation, especially for the manufacture of a vaccine against H. pylori infection, is provided.

[0049] Also an antibody, or at least an effective part thereof, which binds at least to a selective part of the hyperimmune serum-reactive antigen or a fragment thereof according to the present invention is provided herewith.

[0050] In a preferred embodiment the antibody is a monoclonal antibody.

[0051] In another preferred embodiment the effective part of the antibody comprises Fab fragments.

[0052] In a further preferred embodiment the antibody is a chimeric antibody.

[0053] In a still preferred embodiment the antibody is a humanized antibody.

[0054] The present invention also provides a hybridoma cell line, which produces an antibody according to the present invention.

[0055] Moreover, the present invention provids a method for producing an antibody according to the present invention, characterized by the following steps:
[0056] initiating an immune response in a non-human animal by administrating an hyperimmune serum-reactive antigen or a fragment thereof, as defined in the invention, to said animal,
[0057] removing an antibody containing body fluid from said animal, and
[0058] producing the antibody by subjecting said antibody containing body fluid to further purification steps.

[0059] Accordingly, the present invention also provides a method for producing an antibody according to the present invention, characterized by the following steps:
[0060] a initiating an immune response in a non-human animal by administrating an hyperimmune serum-reactive antigen or a fragment thereof, as defined in the present invention, to said animal,
[0061] removing the spleen or spleen cells from said animal,
[0062] producing hybridoma cells of said spleen or spleen cells,
[0063] selecting and cloning hybridoma cells specific for said hyperimmune serum-reactive antigens or a fragment thereof,
[0064] producing the antibody by cultivation of said cloned hybridoma cells and optionally further purification steps.

[0065] The antibodies provided or produced according to the above methods may be used for the preparation of a medicament for treating or preventing H. pylori infections.

[0066] According to another aspect the present invention provides an antagonist, which binds to a hyperimmune serum-reactive antigen or a fragment thereof according to the present invention.

[0067] Such an antagonist capable of binding to a hyperimmune serum-reactive antigen or fragment thereof according to the present invention may be identified by a method comprising the following steps:
[0068] a) contacting an isolated or immobilized hyperimmune serum-reactive antigen or a fragment thereof according to the present invention with a candidate antagonist under conditions to permit binding of said candidate antagonist to said hyperimmune serum-reactive antigen or fragment, in the presence of a component capable of providing a detectable signal in response to the binding of the candidate antagonist to said hyperimmune serum reactive antigen or fragment thereof; and
[0069] b) detecting the presence or absence of a signal generated in response to the binding of the antagonist to the hyperimmune serum reactive antigen or the fragment thereof.

[0070] An antagonist capable of reducing or inhibiting the interaction activity of a hyperimmune serum-reactive antigen or a fragment thereof according to the present invention to its interaction partner may be identified by a method comprising the following steps:
[0071] a) providing a hyperimmune serum reactive antigen or a hyperimmune fragment thereof according to the present invention,
[0072] b) providing an interaction partner to said hyperimmune serum reactive antigen or a fragment thereof, especially an antibody according to the present invention,
[0073] c) allowing interaction of said hyperimmune serum reactive antigen or fragment thereof to said interaction partner to form an interaction complex,
[0074] d) providing a candidate antagonist,
[0075] e) allowing a competition reaction to occur between the candidate antagonist and the interaction complex,
[0076] f) determining whether the candidate antagonist inhibits or reduces the interaction activities of the hyperimmune serum reactive antigen or the fragment thereof with the interaction partner.

[0077] The hyperimmune serum reactive antigens or fragments thereof according to the present invention may be used for the isolation and/or purification and/or identification of an interaction partner of said hyperimmune serum reactive antigen or fragment thereof.

[0078] The present invention also provides a process for in vitro diagnosing a disease related to expression of a hyperimmune serum-reactive antigen or a fragment thereof according to the present invention comprising determining the presence of a nucleic acid sequence encoding said hyperimmune serum reactive antigen or fragment thereof according to the present invention or the presence of the hyperimmune serum reactive antigen or fragment thereof according to the present invention.

[0079] The present invention also provides a process for in vitro diagnosis of a bacterial infection, especially a H. pylori infection, comprising analyzing for the presence of a nucleic acid sequence encoding said hyperimmune serum reactive antigen or fragment thereof according to the present invention or the presence of the hyperimmune serum reactive antigen or fragment thereof according to the present invention.

[0080] Moreover, the present invention provides the use of a hyperimmune serum reactive antigen or fragment thereof according to the present invention for the generation of a peptide binding to said hyperimmune serum reactive antigen or fragment thereof, wherein the peptide is an anticaline.

[0081] The present invention also provides the use of a hyperimmune serum-reactive antigen or fragment thereof according to the present invention for the manufacture of a functional nucleic acid, wherein the functional nucleic acid is selected from the group comprising aptamers and spiegelmers.

[0082] The nucleic acid molecule according to the present invention may also be used for the manufacture of a functional ribonucleic acid, wherein the functional ribonucleic acid is selected from the group comprising ribozymes, antisense nucleic acids and siRNA.

[0083] The present invention advantageously provides an efficient, relevant and comprehensive set of isolated nucleic acid molecules and their encoded hyperimmune serum reactive antigens or fragments thereof identified from H. pylori using an antibody preparation from multiple human plasma pools and surface expression libraries derived from the genome of H. pylori. Thus, the present invention fulfils a widely felt demand for H. pylori antigens, vaccines, diagnostics and products useful in procedures for preparing antibodies and for identifying compounds effective against H. pylori infection.

[0084] An effective vaccine should be composed of proteins or polypeptides, which are expressed by all strains and are able to induce high affinity, abundant antibodies against cell surface components of H. pylori. The antibodies should be IgG1 and/or IgG3 for opsonization, and any IgG subtype and IgA for neutralisation of adherence and toxin action. A chemically defined vaccine must be definitely superior compared to a whole cell vaccine (attenuated or killed), since components of H. pylori, which cross-react with human tissues or inhibit opsonization can be eliminated, and the individual proteins inducing protective antibodies and/or a protective immune response can be selected.

[0085] The approach, which has been employed for the present invention, is based on the interaction of H. pylori proteins or peptides with the antibodies present in human sera. The antibodies produced against H. pylori by the human immune system and present in human sera are indicative of the in vivo expression of the antigenic proteins and their immunogenicity. In addition, the antigenic proteins as identified by the bacterial surface display expression libraries using pools of pre-selected sera are processed in a second and third round of screening by individual selected or generated sera. Thus the present invention supplies an efficient, relevant, comprehensive set of H. pylori antigens as promising candidates for the development of a pharmaceutical composition, especially a vaccine preventing infection by H. pylori.

[0086] In the antigen identification program for identifying a comprehensive set of antigens according to the present invention, at least two different bacterial surface expression libraries are screened with several serum pools or plasma fractions or other pooled antibody containing body fluids (antibody pools). The antibody pools are derived from a serum collection, which has been tested against antigenic compounds of H. pylori, such as whole cell extracts and culture supernatant proteins. Preferably, 2 distinct serum collections are used: 1. With very stable antibody repertoire: normal adults, clinically healthy people, who are non-carriers and overcame previous encounters or currently carriers of H. pylori without acute disease and symptoms, 2. With antibodies induced acutely by the presence of the pathogenic organism: patients with manifest disease (e.g. H. pylori gastritis, peptic ulcer disease or gastric cancer). Sera have to react with multiple H. pylori-specific antigens in order to be considered hyperimmune and therefore relevant in the screening method applied for the present invention. The antibodies produced against H. pylori by the human immune system and present in human sera are indicative of the in vivo expression of the antigenic proteins and their immunogenicity.

[0087] The expression libraries as used in the present invention should allow expression of all potential antigens, e.g. derived from all surface proteins of H. pylori. Bacterial surface display libraries will be represented by a recombinant library of a bacterial host displaying a (total) set of expressed peptide sequences of H. pylori on a number of selected outer membrane proteins (LamB, FhuA) at the bacterial host membrane {Georgiou, G., 1997}; {Etz, H. et al., 2001}. One of the advantages of using recombinant expression libraries is that the identified hyperimmune serum-reactive antigens may be instantly produced by expression of the coding sequences of the screened and selected clones expressing the hyperimmune serum-reactive antigens without further recombinant DNA technology or cloning steps necessary.

[0088] The comprehensive set of antigens identified by the described program according to the present invention is analysed further by additional rounds of screening. Therefore individual antibody preparations or antibodies generated against selected peptides, which were identified as immunogenic are used. According to a preferred embodiment the individual antibody preparations for the second round of screening are derived from patients who have suffered from infection with H. pylori, especially from patients who show an antibody titer above a certain minimum level, for example an antibody titer being higher than 80 percentile, preferably higher than 90 percentile, especially higher than 95 percentile of the human (patient or healthy individual) sera tested. Using such high titer individual antibody preparations in the second screening round allows a very selective identification of the hyperimmune serum-reactive antigens and fragments thereof from H. pylori.

[0089] Following the high throughput screening procedure, the selected antigenic proteins, expressed as recombinant proteins or in vitro translated products, in case it can not be expressed in prokaryotic expression systems, or the identified antigenic peptides (produced synthetically) are tested in a second screening by a series of ELISA and Western blotting assays for the assessment of their immunogenicity with a large human serum collection (>50 uninfected, >100 patients sera).

[0090] It is important that the individual antibody preparations (which may also be the selected serum) allow a selective identification of the hyperimmune serum-reactive antigens from all the promising candidates from the first round. Therefore, preferably at least 10 individual antibody preparations (i.e. antibody preparations (e.g. sera) from at least 10 different individuals having suffered from an infection to the chosen pathogen) should be used in identifying these antigens in the second screening round. It is possible to use also less than 10 individual preparations, however, selectivity of the step may not be optimal with a low number of individual antibody preparations. Therefore, recognition of a given hyperimmune serum-reactive antigen (or an antigenic fragment thereof) by at least 10 individual antibody preparations, preferably at least 30, especially at least 50 individual antibody preparations confers proper selectivity in the identification process. Hyperimmune serum-reactivity may of course be tested with as many individual preparations as possible (e.g. with more than 100 or even with more than 1,000).

[0091] Therefore, the relevant portion of the hyperimmune serum-reactive antibody preparations according to the method of the present invention should preferably be at least 10, more preferred at least 30, especially at least 50 individual antibody preparations. Alternatively (or in combination) hyperimmune serum-reactive antigens may preferably be also identified with at least 20%, preferably at least 30%, especially at least 40% of all individual antibody preparations used in the second screening round.

[0092] According to a preferred embodiment of the present invention, the sera from which the individual antibody preparations for the second round of screening are prepared (or which are used as antibody preparations), are selected by their titer against H. pylori (e.g. against a preparation of this pathogen, such as a lysate, cell wall components and recombinant proteins). Preferably, some are selected with a total IgA titer above 4,000 U, especially above 6,000 U, and/or an IgG titer above 10,000 U, especially above 12,000 U (U=units, calculated from the OD₄₀₅ₙₘ reading at a given dilution) when the whole organism (total lysate or whole cells) is used as antigen in the ELISA.

[0093] The antibodies produced against Helicobacter by the human immune system and present in human sera are indicative of the in vivo expression of the antigenic proteins and their immunogenicity. The recognition of linear epitopes by antibodies can be based on sequences as short as 45 amino acids. It, however, does not necessarily mean that these short peptides are capable of inducing the given antibody in vivo. For that reason the defined epitopes, polypeptides and proteins are further to be tested in animals (mainly in mice) for their capacity to induce antibodies against the selected proteins in vivo.

[0094] The preferred antigens are located on the cell surface or secreted, and are therefore accessible extracellularly. Antibodies against cell wall proteins are expected to serve two purposes: to inhibit adhesion and to promote phagocytosis or complement mediated killing. Antibodies against secreted proteins are beneficial in neutralisation of their function as toxin or virulence component. It is also known that bacteria communicate with each other through secreted proteins. Neutralizing antibodies against these proteins will interrupt growth-promoting cross-talk between or within Helicobacter species. Bioinformatic analyses (signal sequences, cell wall localisation signals, transmembrane domains) proved to be very useful in assessing cell surface localisation or secretion. The experimental approach includes the isolation of antibodies with the corresponding epitopes and proteins from human serum, and the generation of immune sera in mice against (poly) peptides selected by the bacterial surface display screens. These sera are then used in a third round of screening as reagents in the following assays: cell surface staining of Helicobacter grown under different conditions (FACS, microscopy), determination of neutralizing capacity (toxin, adherence), and promotion of opsonization and phagocytosis (in vitro phagocytosis assay).

[0095] For that purpose, bacterial E. coli clones are directly injected into mice and immune sera taken and tested in the relevant in vitro assay for functional opsonic or neutralizing antibodies. Alternatively, specific antibodies may be purified from human or mouse sera using peptides or proteins as substrate.

[0096] It is not clear as to what extend host defence against H. pylori relies on innate or adaptive immunological mechanisms. The mucous membranes and the gastric acidic environment are formidable barriers against invasion by Helicobacter. However, once the mucous membranes are breached the first line of non-adaptive cellular defence begins its co-ordinate action through complement and phagocytes, especially the polymorphonuclear leukocytes (PMNs) as indicated by the massive neutrophil infiltration of the gastric mucosa in response to the presence of H. pylori. Attachment of H. pylori induces strong pro-inflammatory cytokine release, including TNF-α, IL-1β and IL-8 that can mediate a local chemoattractant effect for immuno-effector cells, such as granulocytes {Prinz, C. et al., 2003}; {Sutton, P., 2001}. These cells can be regarded as the cornerstones in eliminating invading bacteria. As H. pylori is thought to be a exclusively extracellular pathogen, the major anti-Helicobacter adaptive response should come from the humoral arm of the immune system, and this seems to be in agreement with the high titers of primarily IgG and IgA antibodies that develop in patient upon H. pylori infection {Prinz, C. et al., 2003}; {Sutton, P., 2001}. The induction of high titer IgG and sectretory IgA type antibody response may reflect the importance of adaptive mechanisms in the immune response against this organism. In principle, the effect of these antibodies is mediated through three major mechanisms: promotion of opsonization, toxin neutralization, and inhibition of adherence. It is believed that opsonization is especially important, because of its requirement for an effective phagocytosis. For efficient opsonization the microbial surface has to be coated with antibodies and complement factors for recognition by PMNs through receptors for the Fc fragment of IgG molecules or for activated C3b. After opsonization, the bacteria are phagocytosed and killed. Antibodies bound to specific antigens on the cell surface of bacteria serve as ligands for the attachment to PMNs and to promote phagocytosis. The very same antibodies bound to the adhesins and other cell surface proteins are expected to neutralize adhesion and prevent colonization.

[0097] Inducing high affinity antibodies of the opsonic and neutralizing type by vaccination helps the innate immune system to eliminate bacteria and toxins. This makes the method according to the present invention an optimal tool for the identification of H. pylori antigenic proteins. The selection of antigens as provided by the present invention is thus well suited to identify those that will lead to protection against infection in an animal model or in humans.

[0098] However, there is compelling evidence indicating that antibodies are not required for immunisation-induced effective immunity against gastric helicobacters. Indeed, in vitro studies have demonstrated that diminutive fraction of the colonizing H. pylori population might enter epithelial cells and this is in good agreement with the fact that H. pylori generally induces a predominantly T helper 1 (Th1) type immune response, normally associated with invasive bacteria. Gastric T cells isolated from infected animals and humans produce TNF-α and IFN-γ but not IL-4, typical for a Th1-biased response. This pro-inflammatory Th1 response is clearly not effective against infection {Prinz, C. et al., 2003}; {Sutton, P., 2001}. Current vaccination protocols, such as immunization with recombinant UreB, can drive the immune response to a polarized Th2 phenotype. Studies with knockout mice demonstrated that immunization with urease is possible when the Th2 response is absent. Therefore, vaccine development using new antigens as well as suitable adjuvants that are capable of inducing strong Th1-biased responses may be beneficial in disease protection caused by H. pylori.

[0099] According to the antigen identification method used herein, the present invention can surprisingly provide a set of comprehensive novel nucleic acids and novel hyperimmune serum reactive antigens and fragments thereof of H. pylori, among other things, as described below. According to one aspect, the invention particularly relates to the nucleotide sequences encoding hyperimmune serum reactive antigens which sequences are set forth in the Sequence listing Seq ID No 1-178, and the corresponding encoded amino acid sequences representing hyperimmune serum reactive antigens are set forth in the Sequence Listing Seq ID No 179-356.

[0100] In a preferred embodiment of the present invention, a nucleic acid molecule is provided which exhibits 70% identity over their entire length to a nucleotide sequence set forth with Seq ID No 3-4, 16, 19-21, 28-29, 33-38, 41-42, 44, 48-52, 55, 57-58, 61, 63, 65, 67-68, 72, 74-75, 81, 84, 91, 94, 96-97, 101, 105-108, 112, 115-117, 119, 123-178. Most highly preferred are nucleic acids that comprise a region that is at least 80% or at least 85% identical over their entire length to a nucleic acid molecule set forth with Seq ID No 3-4, 16, 19-21, 28-29, 33-38, 41-42, 44, 48-52, 55, 57-58, 61, 63, 65, 67-68, 72, 74-75, 81, 84, 91, 94, 96-97, 101, 105-108, 112, 115-117, 119, 123-178. In this regard, nucleic acid molecules at least 90%, 91%, 92%, 93%, 94%, 95%, or 96% identical over their entire length to the same are particularly preferred. Furthermore, those with at least 97% are highly preferred, those with at least 98% and at least 99% are particularly highly preferred, with at least 99% or 99.5% being the more preferred, with 100% identity being especially preferred. Moreover, preferred embodiments in this respect are nucleic acids which encode hyperimmune serum reactive antigens or fragments thereof (polypeptides) which retain substantially the same biological function or activity as the mature polypeptide encoded by said nucleic acids set forth in the Seq ID No 3-4, 16, 19-21, 28-29, 33-38, 41-42, 44, 48-52, 55, 57-58, 61, 63, 65, 67-68, 72, 74-75, 81, 84, 91, 94, 96-97, 101, 105-108, 112, 115-117, 119, 123-178.

[0101] Identity, as known in the art and used herein, is the relationship between two or more polypeptide sequences or two or more polynucleotide sequences, as determined by comparing the sequences. In the art, identity also means the degree of sequence relatedness between polypeptide or polynucleotide sequences, as the case may be, as determined by the match between strings of such sequences. Identity can be readily calculated. While there exist a number of methods to measure identity between two polynucleotides or two polypeptide sequences, the term is well known to skilled artisans (e.g. Sequence Analysis in Molecular Biology, von Heinje, G., Academic Press, 1987). Preferred methods to determine identity are designed to give the largest match between the sequences tested. Methods to determine identity are codified in computer programs. Preferred computer program methods to determine identity between two sequences include, but are not limited to, GCG program package {Devereux, J. et al., 1984}, BLASTP, BLASTN, and FASTA {Altschul, S. et al., 1990}.

[0102] According to another aspect of the invention, nucleic acid molecules are provided which exhibit at least 96% identity to the nucleic acid sequence set forth with Seq ID No 8-10, 13-15, 17-18, 24, 27, 32, 39-40, 45-47, 56, 59, 62, 69-70, 73, 77, 79, 82, 85-86, 88, 90, 103, 109-110, 114, 121.

[0103] According to a further aspect of the present invention, nucleic acid molecules are provided which are identical to the nucleic acid sequences set forth with Seq ID No 5, 7, 30-31, 53, 60, 66, 76, 83, 87, 92, 99, 120.

[0104] The nucleic acid molecules according to the present invention can as a second alternative also be a nucleic acid molecule which is at least essentially complementary to the nucleic acid described as the first alternative above. As used herein complementary means that a nucleic acid strand is base pairing via Watson-Crick base pairing with a second nucleic acid strand. Essentially complementary as used herein means that the base pairing is not occurring for all of the bases of the respective strands but leaves a certain number or percentage of the bases unpaired or wrongly paired. The percentage of correctly pairing bases is preferably at least 70%, more preferably 80%, even more preferably 90% and most preferably any percentage higher than 90%. It is to be noted that a percentage of 70% matching bases is considered as homology and the hybridization having this extent of matching base pairs is considered as stringent. Hybridization conditions for this kind of stringent hybridization may be taken from Current Protocols in Molecular Biology (John Wiley and Sons, Inc, 1987). More particularly, the hybridization conditions can be as follows:
[0105] Hybridization performed e.g. in 5×SSPE, 5×Denhardt's reagent, 0.1% SDS, 100 g/mL sheared DNA at 68° C.
[0106] Moderate stringency wash in 0.2×SSC, 0.1% SDS at 42° C.
[0107] High stringency wash in 0.1×SSC, 0.1% SDS at 68° C.

[0108] Genomic DNA with a GC content of 50% has an approximate TM of 96° C. For 1% mismatch, the TM is reduced by approximately 1° C.

[0109] In addition, any of the further hybridization conditions described herein is in principle applicable as well.

[0110] All nucleic acid sequence molecules which encode the same polypeptide molecule as those identified by the present invention are encompassed by any disclosure of a given coding sequence, since the degeneracy of the genetic code is directly applicable to unambiguously determine all possible nucleic acid molecules which encode a given polypeptide molecule, even if the number of such degenerated nucleic acid molecules may be high. This is also applicable for fragments of a given polypeptide, as long as the fragments encode a polypeptide being suitable to be used in a vaccination connection, e.g. as an active or passive vaccine.

[0111] The nucleic acid molecule according to the present invention can as a third alternative also be a nucleic acid which comprises a stretch of at least 15 bases of the nucleic acid molecule according to the first and second alternative of the nucleic acid molecules according to the present invention as outlined above. Preferably, the bases form a contiguous stretch of bases. However, it is also within the scope of the present invention that the stretch consists of two or more moieties, which are separated by a number of bases.

[0112] The present nucleic acids may preferably consist of at least 20, even more preferred at least 30, especially at least 50 contiguous bases from the sequences disclosed herein. The suitable length may easily be optimized due to the planned area of use (e.g. as (PCR) primers, probes, capture molecules (e.g. on a (DNA) chip), etc.). Preferred nucleic acid molecules contain at least a contiguous 15 base portion of one or more of the predicted immunogenic amino acid sequences listed in tables 1 and 2, especially the sequences of table 2 with scores of more than 10, preferably more than 20, especially with a score of more than 25. Specifically preferred are nucleic acids containing a contiguous portion of a DNA sequence of any sequence in the sequence protocol of the present application which shows 1 or more, preferably more than 2, especially more than 5, non-identical nucleic acid residues compared to the published Helicobacter pylori strain 26695 and J99 genomes (Nature, 388: 539-547 (1997), 4658-4663; GenBank accession AE000511 and Nature, 397: 176-180 (1999), GenBank accession AE001439) and/or any other published H. pylori genome sequence or parts thereof. Specifically preferred non-identical nucleic acid residues are residues, which lead to a non-identical amino acid residue. Preferably, the nucleic acid sequences encode for polypeptides having at least 1, preferably at least 2, preferably at least three different amino acid residues compared to the published H. pylori counterparts mentioned above. Also such isolated polypeptides, being fragments of the proteins (or the whole protein) mentioned herein e.g. in the sequence listing, having at least 6, 7, or 8 amino acid residues and being encoded by these nucleic acids are preferred.

[0113] The nucleic acid molecule according to the present invention can as a fourth alternative also be a nucleic acid molecule which anneals under stringent hybridisation conditions to any of the nucleic acids of the present invention according to the above outlined first, second, and third alternative. Stringent hybridisation conditions are typically those described herein.

[0114] Finally, the nucleic acid molecule according to the present invention can as a fifth alternative also be a nucleic acid molecule which, but for the degeneracy of the genetic code, would hybridise to any of the nucleic acid molecules according to any nucleic acid molecule of the present invention according to the first, second, third, and fourth alternative as outlined above. This kind of nucleic acid molecule refers to the fact that preferably the nucleic acids according to the present invention code for the hyperimmune serum reactive antigens or fragments thereof according to the present invention. This kind of nucleic acid molecule is particularly useful in the detection of a nucleic acid molecule according to the present invention and thus the diagnosis of the respective microorganisms such as H. pylori and any disease or diseased condition where this kind of microorganim is involved. Preferably, the hybridisation would occur or be preformed under stringent conditions as described in connection with the fourth alternative described above.

[0115] Nucleic acid molecule as used herein generally refers to any ribonucleic acid molecule or deoxyribonucleic acid molecule, which may be unmodified RNA or DNA or modified RNA or DNA. Thus, for instance, nucleic acid molecule as used herein refers to, among other, single- and double-stranded DNA, DNA that is a mixture of single- and double-stranded RNA, and RNA that is a mixture of single- and double-stranded regions, hybrid molecules comprising DNA and RNA that may be single-stranded or, more typically, double-stranded, or triple-stranded, or a mixture of single- and double-stranded regions. In addition, nucleic acid molecule as used herein refers to triple-stranded regions comprising RNA or DNA or both RNA and DNA. The strands in such regions may be from the same molecule or from different molecules. The regions may include all of one or more of the molecules, but more typically involve only a region of some of the molecules. One of the molecules of a triple-helical region often is an oligonucleotide. As used herein, the term nucleic acid molecule includes DNAs or RNAs as described above that contain one or more modified bases. Thus, DNAs or RNAs with backbones modified for stability or for other reasons are “nucleic acid molecule” as that term is intended herein. Moreover, DNAs or RNAs comprising unusual bases, such as inosine, or modified bases, such as tritylated bases, to name just two examples, are nucleic acid molecule as the term is used herein. It will be appreciated that a great variety of modifications have been made to DNA and RNA that serve many useful purposes known to those of skill in the art. The term nucleic acid molecule as it is employed herein embraces such chemically, enzymatically or metabolically modified forms of nucleic acid molecule, as well as the chemical forms of DNA and RNA characteristic of viruses and cells, including simple and complex cells, inter alia. The term nucleic acid molecule also embraces short nucleic acid molecules often referred to as oligonucleotide(s). “Polynucleotide” and “nucleic acid” or “nucleic acid molecule” are often used interchangeably herein.

[0116] Nucleic acid molecules provided in the present invention also encompass numerous unique fragments, both longer and shorter than the nucleic acid molecule sequences set forth in the sequencing listing of the H. pylori coding regions, which can be generated by standard cloning methods. To be unique, a fragment must be of sufficient size to distinguish it from other known nucleic acid sequences, most readily determined by comparing any selected H. pylori fragment to the nucleotide sequences in computer databases such as GenBank.

[0117] Additionally, modifications can be made to the nucleic acid molecules and polypeptides that are encompassed by the present invention. For example, nucleotide substitutions can be made which do not affect the polypeptide encoded by the nucleic acid, and thus any nucleic acid molecule which encodes a hyperimmune serum reactive antigen or fragments thereof is encompassed by the present invention.

[0118] Furthermore, any of the nucleic acid molecules encoding hyperimmune serum reactive antigens or fragments thereof provided by the present invention can be functionally linked, using standard techniques such as standard cloning techniques, to any desired regulatory sequences, whether a H. pylori regulatory sequence or a heterologous regulatory sequence, heterologous leader sequence, heterologous marker sequence or a heterologous coding sequence to create a fusion protein.

[0119] Nucleic acid molecules of the present invention may be in the form of RNA, such as mRNA or cRNA, or in the form of DNA, including, for instance, cDNA and genomic DNA obtained by cloning or produced by chemical synthetic techniques or by a combination thereof. The DNA may be triple-stranded, double-stranded or single-stranded. Single-stranded DNA may be the coding strand, also known as the sense strand, or it may be the non-coding strand, also referred to as the anti-sense strand.

[0120] The present invention further relates to variants of the herein above described nucleic acid molecules which encode fragments, analogs and derivatives of the hyperimmune serum reactive antigens and fragments thereof having a deducted H. pylori amino acid sequence set forth in the Sequence Listing. A variant of the nucleic acid molecule may be a naturally occurring variant such as a naturally occurring allelic variant, or it may be a variant that is not known to occur naturally. Such non-naturally occurring variants of the nucleic acid molecule may be made by mutagenesis techniques, including those applied to nucleic acid molecules, cells or organisms.

[0121] Among variants in this regard are variants that differ from the aforementioned nucleic acid molecules by nucleotide substitutions, deletions or additions. The substitutions, deletions or additions may involve one or more nucleotides. The variants may be altered in coding or non-coding regions or both. Alterations in the coding regions may produce conservative or non-conservative amino acid substitutions, deletions or additions. Preferred are nucleic acid molecules encoding a variant, analog, derivative or fragment, or a variant, analogue or derivative of a fragment, which have a H. pylori sequence as set forth in the Sequence Listing, in which several, a few, 5 to 10, 1 to 5, 1 to 3, 2, 1 or no amino acid(s) is substituted, deleted or added, in any combination. Especially preferred among these are silent substitutions, additions and deletions, which do not alter the properties and activities of the H. pylori polypeptides set forth in the Sequence Listing. Also especially preferred in this regard are conservative substitutions.

[0122] The peptides and fragments according to the present invention also include modified epitopes wherein preferably one or two of the amino acids of a given epitope are modified or replaced according to the rules disclosed in e.g. {Tourdot, S. et al., 2000}, as well as the nucleic acid sequences encoding such modified epitopes.

[0123] It is clear that also epitopes derived from the present epitopes by amino acid exchanges improving, conserving or at least not significantly impeding the T cell activating capability of the epitopes are covered by the epitopes according to the present invention. Therefore the present epitopes also cover epitopes, which do not contain the original sequence as derived from H. pylori, but trigger the same or preferably an improved T cell response. These epitope are referred to as “heteroclitic”; they need to have a similar or preferably greater affinity to MHC/HLA molecules, and the need the ability to stimulate the T cell receptors (TCR) directed to the original epitope in a similar or preferably stronger manner.

[0124] Heteroclitic epitopes can be obtained by rational design i.e. taking into account the contribution of individual residues to binding to MHC/HLA as for instance described by {Rammensee, H. et al., 1999}, combined with a systematic exchange of residues potentially interacting with the TCR and testing the resulting sequences with T cells directed against the original epitope. Such a design is possible for a skilled man in the art without much experimentation.

[0125] Another possibility includes the screening of peptide libraries with T cells directed against the original epitope. A preferred way is the positional scanning of synthetic peptide libraries. Such approaches have been described in detail for instance by {Hemmer, B. et al., 1999} and the references given therein.

[0126] As an alternative to epitopes represented by the present derived amino acid sequences or heteroclitic epitopes, also substances mimicking these epitopes e.g. “peptidemimetica” or “retro-inverso-peptides” can be applied.

[0127] Another aspect of the design of improved epitopes is their formulation or modification with substances increasing their capacity to stimulate T cells. These include T helper cell epitopes, lipids or liposomes or preferred modifications as described in WO 01/78767.

[0128] Another way to increase the T cell stimulating capacity of epitopes is their formulation with immune stimulating substances for instance cytokines or chemokines like interleukin-2, -7, -12, -18, class I and II interferons (IFN), especially IFN-gamma, GM-CSF, TNF-alpha, flt3-ligand and others.

[0129] As discussed additionally herein regarding nucleic acid molecule assays of the invention, for instance, nucleic acid molecules of the invention as discussed above, may be used as a hybridization probe for RNA, cDNA and genomic DNA to isolate full-length cDNAs and genomic clones encoding polypeptides of the present invention and to isolate cDNA and genomic clones of other genes that have a high sequence similarity to the nucleic acid molecules of the present invention. Such probes generally will comprise at least 15 bases. Preferably, such probes will have at least 20, at least 25 or at least 30 bases, and may have at least 50 bases. Particularly preferred probes will have at least 30 bases, and will have 50 bases or less, such as 30, 35, 40, 45, or 50 bases.

[0130] For example, the coding region of a nucleic acid molecule of the present invention may be isolated by screening a relevant library using the known DNA sequence to synthesize an oligonucleotide probe. A labeled oligonucleotide having a sequence complementary to that of a gene of the present invention is then used to screen a library of cDNA, genomic DNA or mRNA to determine to which members of the library the probe hybridizes.

[0131] The nucleic acid molecules and polypeptides of the present invention may be employed as reagents and materials for development of treatments of and diagnostics for disease, particularly human disease, as further discussed herein relating to nucleic acid molecule assays, inter alia.

[0132] The nucleic acid molecules of the present invention that are oligonucleotides can be used in the processes herein as described, but preferably for PCR, to determine whether or not the H. pylori genes identified herein in whole or in part are present and/or transcribed in infected tissue such as blood. It is recognized that such sequences will also have utility in diagnosis of the stage of infection and type of infection the pathogen has attained. For this and other purposes the arrays comprising at least one of the nucleic acids according to the present invention as described herein, may be used.

[0133] The nucleic acid molecules according to the present invention may be used for the detection of nucleic acid molecules and organisms or samples containing these nucleic acids. Preferably such detection is for diagnosis, more preferable for the diagnosis of a disease related or linked to the present or abundance of H. pylori.

[0134] Eukaryotes (herein also “individual(s)”), particularly mammals, and especially humans, infected with H. pylori may be identifiable by detecting any of the nucleic acid molecules according to the present invention detected at the DNA level by a variety of techniques. Preferred nucleic acid molecules candidates for distinguishing a H. pylori from other organisms can be obtained.

[0135] The invention provides a process for diagnosing disease, arising from infection with H. pylori, comprising determining from a sample isolated or derived from an individual an increased level of expression of a nucleic acid molecule having the sequence of a nucleic acid molecule set forth in the Sequence Listing. Expression of nucleic acid molecules can be measured using any one of the methods well known in the art for the quantitation of nucleic acid molecules, such as, for example, PCR, RT-PCR, Rnase protection, Northern blotting, other hybridisation methods and the arrays described herein.

[0136] Isolated as used herein means separated “by the hand of man” from its natural state; i.e., that, if it occurs in nature, it has been changed or removed from its original environment, or both. For example, a naturally occurring nucleic acid molecule or a polypeptide naturally present in a living organism in its natural state is not “isolated,” but the same nucleic acid molecule or polypeptide separated from the coexiting materials of its natural state is “isolated”, as the term is employed herein. As part of or following isolation, such nucleic acid molecules can be joined to other nucleic acid molecules, such as DNAs, for mutagenesis, to form fusion proteins, and for propagation or expression in a host, for instance. The isolated nucleic acid molecules, alone or joined to other nucleic acid molecules such as vectors, can be introduced into host cells, in culture or in whole organisms. Introduced into host cells in culture or in whole organisms, such DNAs still would be isolated, as the term is used herein, because they would not be in their naturally occurring form or environment. Similarly, the nucleic acid molecules and polypeptides may occur in a composition, such as a media formulations, solutions for introduction of nucleic acid molecules or polypeptides, for example, into cells, compositions or solutions for chemical or enzymatic reactions, for instance, which are not naturally occurring compositions, and, therein remain isolated nucleic acid molecules or polypeptides within the meaning of that term as it is employed herein.

[0137] The nucleic acids according to the present invention may be chemically synthesized. Alternatively, the nucleic acids can be isolated from H. pylori by methods known to the one skilled in the art.

[0138] According to another aspect of the present invention, a comprehensive set of novel hyperimmune serum reactive antigens and fragments thereof are provided by using the herein described antigen identification method. In a preferred embodiment of the invention, a hyperimmune serum-reactive antigen comprising an amino acid sequence being encoded by any one of the nucleic acids molecules herein described and fragments thereof are provided. In another preferred embodiment of the invention a novel set of hyperimmune serum-reactive antigens which comprises amino acid sequences selected from a group consisting of the polypeptide sequences as represented in Seq ID No 181-182, 194, 197-199, 206-207, 211-216, 219-220, 222, 226-230, 233, 235-236, 239, 241, 243, 245-246, 250, 252-253, 259, 262, 269, 272, 274-275, 279, 283-286, 290, 293-295, 297, 301-356 and fragments thereof are provided. In a further preferred embodiment of the invention hyperimmune serum-reactive antigens, which comprise amino acid sequences selected from a group consisting of the polypeptide sequences as represented in Seq ID No 186-188, 191-193, 195-196, 202, 205, 210, 217-218, 223-225, 234, 237, 240, 247-248, 251, 255, 257, 260, 263-264, 266, 268, 281, 287-288, 292, 299 and fragments thereof are provided. In a still preferred embodiment of the invention hyperimmune serum-reactive antigens which comprise amino acid sequences selected from a group consisting of the polypeptide sequences as represented in Seq ID No 183, 185, 208-209, 231, 238, 244, 254, 261, 265, 270, 277, 298 and fragments thereof are provided.

[0139] The hyperimmune serum reactive antigens and fragments thereof as provided in the invention include any polypeptide set forth in the Sequence Listing as well as polypeptides which have at least 70% identity to a polypeptide set forth in the Sequence Listing, preferably at least 80% or 85% identity to a polypeptide set forth in the Sequence Listing, and more preferably at least 90% similarity (more preferably at least 90% identity) to a polypeptide set forth in the Sequence Listing and still more preferably at least 95%, 96%, 97%, 98%, 99% or 99.5% similarity (still more preferably at least 95%, 96%, 97%, 98%, 99%, or 99.5% identity) to a polypeptide set forth in the Sequence Listing and also include portions of such polypeptides with such portion of the polypeptide generally containing at least 4 amino acids and more preferably at least 8, still more preferably at least 30, still more preferably at least 50 amino acids, such as 4, 8, 10, 20, 30, 35, 40, 45 or 50 amino acids.

[0140] The invention also relates to fragments, analogs, and derivatives of these hyperimmune serum reactive antigens and fragments thereof. The terms “fragment”, “derivative” and “analog” when referring to an antigen whose amino acid sequence is set forth in the Sequence Listing, means a polypeptide which retains essentially the same or a similar biological function or activity as such hyperimmune serum reactive antigen and fragment thereof.

[0141] The fragment, derivative or analog of a hyperimmune serum reactive antigen and fragment thereof may be 1) one in which one or more of the amino acid residues are substituted with a conserved or non-conserved amino acid residue (preferably a conserved amino acid residue) and such substituted amino acid residue may or may not be one encoded by the genetic code, or 2) one in which one or more of the amino acid residues includes a substituent group, or 3) one in which the mature hyperimmune serum reactive antigen or fragment thereof is fused with another compound, such as a compound to increase the half-life of the hyperimmune serum reactive antigen and fragment thereof (for example, polyethylene glycol), or 4) one in which the additional amino acids are fused to the mature hyperimmune serum reactive antigen or fragment thereof, such as a leader or secretory sequence or a sequence which is employed for purification of the mature hyperimmune serum reactive antigen or fragment thereof or a proprotein sequence. Such fragments, derivatives and analogs are deemed to be within the scope of those skilled in the art from the teachings herein.

[0142] Among the particularly preferred embodiments of the invention in this regard are the hyperimmune serum reactive antigens set forth in the Sequence Listing, variants, analogs, derivatives and fragments thereof, and variants, analogs and derivatives of fragments. Additionally, fusion polypeptides comprising such hyperimmune serum reactive antigens, variants, analogs, derivatives and fragments thereof, and variants, analogs and derivatives of the fragments are also encompassed by the present invention. Such fusion polypeptides and proteins, as well as nucleic acid molecules encoding them, can readily be made using standard techniques, including standard recombinant techniques for producing and expression of a recombinant polynucleic acid encoding a fusion protein.

[0143] Among preferred variants are those that vary from a reference by conservative amino acid substitutions. Such substitutions are those that substitute a given amino acid in a polypeptide by another amino acid of like characteristics. Typically seen as conservative substitutions are the replacements, one for another, among the aliphatic amino acids Ala, Val, Leu and Ile; interchange of the hydroxyl residues Ser and Thr, exchange of the acidic residues Asp and Glu, substitution between the amide residues Asn and Gln, exchange of the basic residues Lys and Arg and replacements among the aromatic residues Phe and Tyr.

[0144] Further particularly preferred in this regard are variants, analogs, derivatives and fragments, and variants, analogs and derivatives of the fragments, having the amino acid sequence of any polypeptide set forth in the Sequence Listing, in which several, a few, 5 to 10, 1 to 5, 1 to 3, 2, 1 or no amino acid residues are substituted, deleted or added, in any combination. Especially preferred among these are silent substitutions, additions and deletions, which do not alter the properties and activities of the polypeptide of the present invention. Also especially preferred in this regard are conservative substitutions. Most highly preferred are polypeptides having an amino acid sequence set forth in the Sequence Listing without substitutions.

[0145] The hyperimmune serum reactive antigens and fragments thereof of the present invention are preferably provided in an isolated form, and preferably are purified to homogeneity.

[0146] Also among preferred embodiments of the present invention are polypeptides comprising fragments of the polypeptides having the amino acid sequence set forth in the Sequence Listing, and fragments of variants and derivatives of the polypeptides set forth in the Sequence Listing.

[0147] In this regard a fragment is a polypeptide having an amino acid sequence that entirely is the same as part but not all of the amino acid sequence of the afore mentioned hyperimmune serum reactive antigen and fragment thereof, and variants or derivative, analogs, fragments thereof. Such fragments may be “free-standing”, i.e., not part of or fused to other amino acids or polypeptides, or they may be comprised within a larger polypeptide of which they form a part or region. Also preferred in this aspect of the invention are fragments characterised by structural or functional attributes of the polypeptide of the present invention, i.e. fragments that comprise alpha-helix and alpha-helix forming regions, beta-sheet and beta-sheet forming regions, turn and turn-forming regions, coil and coil-forming regions, hydrophilic regions, hydrophobic regions, alpha amphipathic regions, beta-amphipathic regions, flexible regions, surface-forming regions, substrate binding regions, and high antigenic index regions of the polypeptide of the present invention, and combinations of such fragments. Preferred regions are those that mediate activities of the hyperimmune serum reactive antigens and fragments thereof of the present invention. Most highly preferred in this regard are fragments that have a chemical, biological or other activity of the hyperimmune serum reactive antigen and fragments thereof of the present invention, including those with a similar activity or an improved activity, or with a decreased undesirable activity. Particularly preferred are fragments comprising receptors or domains of enzymes that confer a function essential for viability of H. pylori or the ability to cause disease in humans. Further preferred polypeptide fragments are those that comprise or contain antigenic or immunogenic determinants in an animal, especially in a human.

[0148] An antigenic fragment is defined as a fragment of the identified antigen, which is for itself antigenic or may be made antigenic when provided as a hapten. Therefore, also antigens or antigenic fragments showing one or (for longer fragments) only a few amino acid exchanges are enabled with the present invention, provided that the antigenic capacities of such fragments with amino acid exchanges are not severely deteriorated on the exchange(s), i.e., suited for eliciting an appropriate immune response in an individual vaccinated with this antigen and identified by individual antibody preparations from individual sera.

[0149] Preferred examples of such fragments of a hyperimmune serum-reactive antigen are selected from the group consisting of peptides comprising amino acid sequences of column “predicted immunogenic aa”, and “Location of identified immunogenic region” of Table 1, the serum reactive epitope of Table 3: especially peptides comprising amino acids 63-91, 95-101, 110-116, 134-148, 150-156, 158-164, 188-193, 197-209, 226-241, 247-254, 291-297, 312-319, 338-346, 351-358, 366-378, 404-410, 420-438, 448-454, 465-473, 482-488, 490-498, 503-510, 512-519, 531-543, 547-554, 568-575, 589-604, 610-631 and 239-308 of Seq ID No 179; 16-29, 35-47, 50-68, 70-79, 91-101, 143-149, 158-163, 185-191, 196-206, 215-224, 230-237, 244-251, 258-278, 290-311, 319-325, 338-351, 365-385, 396-429, 445-454, 458-466, 491-499, 501-521, 17-79 and 218-233 of Seq ID No 180; 4-10, 16-41, 46-66, 77-84, 91-97, 102-118, 125-144, 187-200, 202-214, 245-253, 255-261, 286-295, 300-330, 335-342, 350-361, 363-381, 385-392, 396-416, 435-450 and 460-470 of Seq ID No 181; 11-19, 27-48, 52-59, 77-82, 84-107, 118-125, 127-154, 178-183, 192-209, 215-221, 286-295, 302-313, 350-357, 402-415, 417-431, 453-463, 465-493 and 313-331 of Seq ID No 182; 19-26, 30-43, 47-55, 63-68, 72-80, 97-104, 107-119, 129-146, 160-175, 194-216, 231-251, 254-260 and 26-43 of Seq ID No 183; 7-13, 29-37, 6-81, 110-120, 123-131, 135-152, 230-249, 254-260, 284-290, 292-299, 317-326, 329-336, 403-444, 452-458, 466-477, 490-498, 510-519, 541-550, 557-566 and 533-567 of Seq ID No 184; 5-47, 71-77, 79-86, 89-95, 120-126, 137-144, 176-181, 184-196, 202-208, 211-232, 236-282, 301-313, 317-325, 341-347, 353-384, 394-400, 412-433, 436-443 and 59-75 of Seq ID No 185; 4-18, 22-38, 59-69, 106-112, 116-130, 138-149, 156-170, 175-197, 200-214, 216-223, 233-244, 255-261, 266-276, 279-286, 325-333, 342-348, 366-399, 402-420, 429-441, 1-104 and 130-147 of Seq ID No 186; 50-58, 69-95, 97-113, 131-136, 157-163, 170-175, 188-212, 220-226, 254-259, 265-277, 283-289, 297-308, 311-318, 347-358, 360-369, 378-401, 416-421, 440-450, 454-462, 470-476, 493-502, 506-514, 536-567, 585-590, 598-607, 613-618, 653-659 and 35-46 of Seq ID No 187; 16-29, 32-60, 65-87, 89-123, 128-134, 137-158, 162-173, 178-196, 210-216, 218-228 and 206-225 of Seq ID No 188; 10-20, 26-35, 51-64, 86-91, 94-100, 113-122, 154-160, 185-191, 193-201, 211-217, 225-230, 237-246, 251-257, 298-304, 306-312, 316-328, 340-348, 357-389, 391-397, 415-421, 449-456, 458-471, 488-495, 502-511, 24-55 and 236-341 of Seq ID No 189; 5-22, 41-51, 87-93, 114-122, 127-136, 150-156, 158-166, 223-233, 245-263, 291-296, 9-126 and 127-285 of Seq ID No 190; 30-43, 46-56, 61-70, 72-83, 85-93, 103-113, 119-125, 151-166, 179-191, 212-218, 225-231, 236-243, 262-267, 291-307, 331-44, 349-355, 366-372, 380-386, 414-422, 428-447, 459-464, 469-478, 507-519, 525-544, 563-569, 576-590, 620-626, 633-643, 654-659, 665-671, 684-707, 717-723, 725-733, 747-779, 782-801 and 347-361 of Seq ID No 191; 4-12, 14-26, 37-80, 107-115, 133-139, 144-150, 154-165, 173-180, 191-199, 205-211, 221-231, 237-244, 254-284, 307-340, 342-353, 360-368, 370-380, 479-493, 495-503, 509-522, 525-536, 539-547, 554-560, 565-573, 578-583, 7-23 and 465-479 of Seq ID No 192; 4-17, 47-55, 76-83, 85-100, 104-112, 117-123, 126-135, 142-148, 156-167, 174-182, 267-273 and 258-283 of Seq ID No 193; 8-32, 36-42, 65-88, 102-108, 112-140, 147-163, 170-179, 183-193 and 117-124 of Seq ID No 194; 12-18, 45-50, 62-77, 82-95, 99-113, 115-123, 125-147, 155-177, 187-209, 211-223, 244-253, 259-270, 278-297, 302-307, 311-318, 329-334, 350-356, 359-365, 390-400, 402-413 and 333-350 of Seq ID No 195; 4-13, 15-27, 30-46, 53-58, 68-74, 82-95, 115-126, 134-139, 148-153, 159-176, 182-199, 201-217, 220-225, 227-235, 237-248, 253-266, 300-315, 322-336, 390-396, 412-426, 438-445, 448-459, 477-484, 502-508, 515-527, 529-537, 553-568, 643-651, 658-667, 690-703 and 376-400 of Seq ID No 196; 4-10, 24-32, 38-55, 59-67, 70-77, 80-87, 89-97, 123-129, 134-151, 166-172, 178-189, 191-216, 218-235, 245-259, 271-315, 326-339, 341-360 and 73-94 of Seq ID No 197; 13-25, 31-38, 43-57, 79-85, 92-99, 106-112, 117-128, 130-139, 146-158, 160-175, 194-204, 211-222, 225-232, 234-242, 263-270, 278-292, 299-320, 322-333 and 240-256 of Seq ID No 198; 4-17, 55-63, 66-101, 109-131, 135-143, 145-151, 155-161, 164-170, 177-185, 192-198, 213-218, 223-238, 246-256, 258-268, 273-283, 309-314, 322-328 and 195-221 of Seq ID No 199; 13-24, 31-39, 41-50, 63-69, 90-96, 104-109, 116-141, 148-153, 161-167, 173-178, 190-209, 253-258, 265-272, 279-289, 295-312, 317-343, 355-366, 376-389, 400-407, 430-451, 453-464, 466-472, 487-493, 499-505, 523-538, 554-559, 568-579, 584-601 and 344-363 of Seq ID No 200; 5-22, 30-36, 53-59, 61-70, 82-92, 99-106, 120-131, 135-148, 154-167, 169-183, 187-199, 204-212, 231-247 and 111-249 of Seq ID No 201; 17-36, 40-66, 71-144, 148-171, 173-191, 199-214, 220-252, 265-272, 278-288, 298-333, 342-385 and 287-307 of Seq ID No 202; 4-16, 22-28, 30-36, 42-48, 95-116, 154-162, 164-174, 239-252, 258-263, 273-285, 306-313, 323-333, 341-357, 363-369, 372-379, 395-401, 430-436, 438-453, 464-480, 33-44, 233-258 and 349-369 of Seq ID No 203; 4-21, 30-37, 46-53, 59-68, 80-92, 98-104, 118-143, 150-160, 165-185, 187-200, 204-211, 224-236, 241-246, 252-258, 271-280, 288-294, 311-320, 335-341 and 191-350 of Seq ID No 204; 4-16, 37-59, 64-70, 79-87, 93-102, 107-127, 143-165, 172-188, 197-204, 207-218, 221-227, 242-248, 258-277, 289-296, 298-316, 332-338, 344-365, 367-373, 375-382, 400-408, 415-425, 438-446 and 235-250 of Seq ID No 205; 4-37, 39-66, 84-98, 101-127, 140-149, 157-163, 166-172, 175-182, 184-193, 203-208, 215-232, 234-247, 250-299, 303-345 and 183-204 of Seq ID No 206; 10-20, 41-61, 73-87, 112-141, 176-192, 194-201, 205-222, 230-237, 257-264, 276-282, 284-310, 312-318, 330-337, 349-357 and 304-328 of Seq ID No 207; 4-31, 42-103, 105-113, 121-153, 160-181, 188-196, 210-226, 231-264, 272-287, 297-304, 328-336 and 304-318 of Seq ID No 208; 21-43, 46-52, 54-70, 72-79, 94-107, 133-141, 160-166, 217-253, 311-317, 359-365, 374-381, 390-395, 434-440, 488-494, 497-502, 511-522, 554-563, 565-574, 577-585, 591-598, 601-606, 617-625, 633-643, 658-664, 676-682, 694-702, 710-719, 754-760, 782-788, 802-808, 916-921, 942-948, 955-964, 973-979, 992-998, 1006-1011, 1016-1023, 1030-1038, 1046-1053, 1059-1066, 1088-1098, 1119-1126, 1129-1135, 1156-1171, 1173-1181, 1202-1210, 1255-1261, 1268-1280, 1295-1310, 1312-1320, 1375-1381, 1406-1417, 1450-1471, 1478-1492, 1498-1506, 1569-1578, 1603-1608, 1611-1624, 1648-1655, 1663-1670, 1680-1698, 1702-1707, 1713-1719, 1737-1742, 1747-1753, 1762-1769, 1771-1785, 1790-1804, 1811-1818, 1830-1836, 1838-1852, 1874-1886, 1893-1899, 1902-1909, 1942-1948, 1952-1962, 1980-1986, 2001-2017, 2020-2028, 2042-2050, 2052-2068, 2074-2079, 2083-2095, 2107-2113, 2147-2155, 2177-2194, 2203-2211, 2236-2241, 2251-2258, 2267-2274, 2285-2292, 2314-2328, 2330-2340, 2358-2365, 2390-2401, 2408-2418, 2432-2453, 2463-2476, 2486-2507, 2528-2537, 2540-2548, 2552-2558, 2568-2576, 2596-2601, 2610-2622, 2629-2638, 2653-2669, 2718-2727, 2749-2767, 2777-2784, 2789-2795, 2806-2815, 2817-2824, 2835-2843, 2847-2854, 2860-2881, 511-523, 612-630 and 1790-1803 of Seq ID No 209; 4-54, 61-68, 72-82, 86-93, 100-108, 115-130, 147-154, 187-194, 196-207, 224-229, 236-251, 275-287 and 96-109 of Seq ID No 210; 31-39, 62-69, 91-101, 158-172, 175-180, 186-193, 201-208, 210-223, 243-250, 273-286, 293-299, 319-325, 343-354, 356-365, 368-384, 414-435, 471-491, 512-518, 550-556, 567-581, 584-589, 633-639, 680-692, 697-708, 716-721, 747-754, 779-786, 810-816 and 366-503 of Seq ID No 211; 5-20, 22-48, 57-65, 96-101, 111-122, 130-145, 154-164, 170-181, 193-199, 201-216, 224-241, 244-262, 281-323, 342-351, 359-367, 369-396, 406-416, 424-433, 450-456, 485-491, 493-499, 501-515, 517-535 and 289-305 of Seq ID No 212; 4-17, 22-44, 53-60, 66-83, 87-94, 101-106, 110-116, 131-137, 148-183, 189-207, 209-215, 233-242, 251-262, 264-272, 290-296, 308-327, 359-373, 375-380, 397-405, 415-420, 426-433, 444-475, 478-484, 529-536, 548-558 and 106-126 of Seq ID No 213; 4-38, 42-50, 58-64, 72-81, 92-118, 140-146, 157-165, 172-192, 198-204, 208-216, 227-234, 238-258, 271-278, 288-293, 311-322, 327-346, 357-370, 375-383, 395-409, 411-417, 425-432, 436-445, 109-129 and 370-380 of Seq ID No 214; 23-30, 36-49, 52-64, 86-94, 97-104, 121-129, 257-272, 279-286, 288-294, 307-327, 334-340, 369-375, 377-386, 406-412, 418-423, 430-438, 441-447, 459-465, 469-476, 482-488, 510-546, 550-580, 584-622, 638-645, 653-659, 675-683, 692-705, 723-731, 752-761, 788-795 and 54-72 of Seq ID No 215; 11-33, 36-46, 88-104, 116-126, 134-170, 189-195, 199-217, 225-250, 255-261, 266-273, 280-291, 296-313, 334-341, 343-349, 354-360, 362-369, 373-380, 387-401, 406-420 and 259-273 of Seq ID No 216; 9-14, 28-44, 57-64, 72-79, 86-93, 104-111, 116-126, 142-150, 159-164 and 61-86 of Seq ID No 217; 10-17, 26-33, 43-61, 69-95, 101-107, 109-125, 129-135, 137-144, 147-153, 158-169, 177-187, 209-219, 221-232, 235-247, 261-268, 271-282, 296-302, 306-347, 355-362, 364-379, 386-399, 409-418, 424-442, 451-460, 467-479, 490-498 and 60-74 of Seq ID No 218; 8-14, 20-31, 65-84, 94-99, 154-179, 193-207, 238-253 and 96-118 of Seq ID No 219; 4-24, 30-44, 47-62, 84-93, 108-116, 124-133, 136-141, 201-209, 217-223, 228-235, 238-245, 247-270, 275-285, 290-314, 328-338, 342-349, 353-365, 375-383, 386-392, 394-402, 417-427, 443-459, 465-481, 492-514, 516-524, 550-566, 602-617, 630-639, 666-676, 687-693, 719-730, 747-753, 783-790, 799-816, 824-831, 837-842 and 167-189 of Seq ID No 220; 6-15, 18-28, 58-66, 84-101, 106-129, 136-151, 154-165, 182-203, 205-211, 214-220, 222-228, 233-240, 251-260, 270-277, 284-291, 306-315, 322-328, 363-369, 378-388, 392-405, 443-452, 495-501, 512-523, 574-583 and 362-375 of Seq ID No 221; 5-25, 27-34, 47-59, 64-70, 76-86, 145-158, 166-183, 189-202, 217-231, 235-242, 260-270, 278-309 and 1-102 of Seq ID No 222; 4-19, 24-76, 78-83, 90-99, 102-109, 114-122, 137-147, 154-174, 177-188, 203-212, 217-223, 227-239 and 226-325 of Seq ID No 223; 7-37, 71-90, 94-109, 117-128, 141-153, 179-192, 199-206, 225-231, 237-243, 258-264 and 40-51 of Seq ID No 224; 13-19, 25-30, 46-59, 75-91, 101-107, 114-124, 129-135, 137-145, 160-167, 171-179, 187-194, 209-215, 217-222, 229-239, 243-249, 257-265, 269-275, 299-308, 310-327 and 282-300 of Seq ID No 225; 86-100, 216-230, 342-369, 382-388, 424-430, 438-445, 452-458, 488-494, 501-518, 554-560, 568-574, 584-592, 603-609, 611-629, 639-645, 652-661, 669-699, 708-714, 726-738, 747-753, 763-775, 785-791, 794-807, 815-824, 826-845, 854-860, 863-868, 870-883, 892-898, 901-906, 909-921, 930-937, 946-959, 968-974, 977-990, 998-1007, 1009-1027, 1037-1043, 1046-1051, 1053-1066, 1075-1081, 1084-1089, 1092-1103, 1113-1119, 1122-1135, 1143-1152, 1154-1172, 1182-1188, 1191-1196, 1200-1210, 1220-1226, 1229-1235, 1237-1249, 1259-1265, 1268-1281, 1289-1298, 1305-1318, 1328-1334, 1337-1343, 1345-1357, 1367-1373, 1390-1396, 1405-1411, 1418-1423, 1426-1435, 1445-1455, 1474-1483, 1493-1500, 1505-1512, 1517-1524, 1538-1544, 1568-1578, 1595-1601, 1674-1682, 1687-1720, 1728-1736, 1738-1744, 1754-1761, 1764-1774, 1798-1824, 1836-1842, 1886-1893, 1895-1903, 366-781, 782-1518 and 1731-1747 of Seq ID No 226; 4-17, 20-39, 46-55, 60-66, 102-110, 114-122, 125-131, 161-167, 172-178, 185-190, 195-202, 218-232, 236-252, 264-291, 293-302, 309-315, 324-339 and 169-381 of Seq ID No 227; 5-10, 13-40, 42-53, 69-75, 83-89, 120-135, 150-161, 174-190, 203-225, 229-247, 257-287, 318-348 and 30-200 of Seq ID No 228; 7-19, 43-53, 64-72, 124-139, 52-84 and 120-131 of Seq ID No 229; 12-19, 39-48, 58-100, 117-123, 154-162, 164-187, 189-195, 202-216, 218-235, 241-246, 262-278, 315-328, 333-347, 354-366, 372-379, 391-405, 422-429, 431-442, 444-450, 458-466, 478-485, 494-501, 504-510, 520-535, 573-580, 589-598, 615-625, 666-676, 686-698, 722-729, 737-746, 756-767, 787-796, 805-816, 824-829, 833-848, 856-864, 866-876, 879-886, 898-904, 918-924, 927-934, 941-960, 967-978 and 561-575 of Seq ID No 230; 11-29, 49-55, 70-77, 84-100, 102-112, 148-155, 160-177, 181-204 and 1-104 of Seq ID No 231; 27-44, 64-71, 122-133, 151-156, 164-178, 214-220, 226-232, 235-244, 253-262, 282-288, 294-310, 317-325, 350-356, 362-368, 376-383, 438-443, 449-454, 459-464, 492-498, 500-511, 529-535, 538-546, 567-573, 597-603, 660-665, 674-679, 724-734, 763-769, 773-784, 791-801, 807-815, 821-826, 840-848, 863-868, 897-902, 908-928, 932-953, 956-975, 980-987, 990-996, 1012-1018, 1042-1063, 1095-1116, 1149-1157, 1160-1167, 110-357, 358-501 and 502-1161 of Seq ID No 232; 4-21, 64-71, 73-84, 128-138, 144-162, 203-217, 240-263, 288-298, 300-308, 310-317, 325-351, 369-380, 391-411 and 330-345 of Seq ID No 233; 5-11, 25-31, 39-48, 51-79, 89-98, 100-122, 135-148, 166-201, 203-227, 230-250, 254-260, 266-272, 274-282, 299-305, 328-337 and 31-45 of Seq ID No 234; 12-23, 29-48, 51-60, 66-72, 75-81, 83-93, 103-115, 133-148, 168-174, 195-204, 222-229, 231-240, 242-251, 270-280, 286-305, 322-344, 349-360, 364-370, 378-400, 421-441, 448-484, 486-493, 495-501, 504-534, 547-561, 567-590, 597-607, 621-635, 643-649, 658-685, 688-694, 702-711, 717-731, 737-742, 759-765, 767-772, 776-786, 803-809, 815-825, 854-908, 910-919, 923-930, 942-948, 961-975, 994-1014 and 915-940 of Seq ID No 235; 4-9, 32-47, 51-61, 75-96, 139-191 and 1-124 of Seq ID No 236; 4-13, 17-38, 43-49, 55-76, 88-95, 110-121, 128-146, 151-157, 162-214, 222-240, 243-249, 251-273, 275-281, 292-298, 300-309, 312-320, 322-331, 355-369, 376-408, 446-460, 471-482, 485-509 and 191-203 of Seq ID No 237; 4-21, 72-82, 89-103, 106-115, 118-124, 140-146, 174-184, 191-200, 204-213, 218-224, 261-266, 282-293, 299-309, 311-340, 342-358, 362-372, 381-389, 391-402, 413-421, 438-447, 457-464, 470-478, 501-507, 545-560, 578-624, 631-641, 658-670, 680-689, 717-738, 753-759, 795-805, 816-822, 830-838, 842-848, 869-881, 892-898, 33-51 and 818-835 of Seq ID No 238; 4-21, 79-85, 156-177, 183-188, 206-214, 243-249, 261-269, 287-292, 315-322, 334-345, 360-366, 374-390, 402-411, 37-97 and 260-399 of Seq ID No 239; 4-9, 19-54, 58-78, 97-104, 111-120, 126-134, 137-145, 163-173, 178-188, 193-203, 211-224, 246-286, 288-324, 337-346, 355-362, 374-390, 392-398, 409-417 and 240-249 of Seq ID No 240; 5-12, 14-31, 35-41, 43-61, 82-92, 97-105, 134-145, 155-166, 184-203, 215-223, 225-251, 272-279, 281-306, 310-345, 358-418, 435-473, 482-490, 525-532, 538-547, 549-563, 578-604, 613-639 and 144-154 of Seq ID No 241; 53-59, 64-72, 74-100, 133-152, 154-172, 176-181, 207-214, 225-238, 275-297, 304-310, 331-340, 362-367, 384-395, 403-410, 437-443, 448-456, 482-490, 579-597, 602-610, 625-630, 633-651, 699-707, 709-715, 734-743, 750-762 and 544-685 of Seq ID No 242; 12-18, 22-40, 45-83, 89-97, 103-109, 147-153, 159-173, 195-204, 210-219, 243-253, 259-265, 273-282, 303-309, 315-325, 332-340, 346-358, 362-367, 377-390, 393-402, 418-426, 447-455, 467-480, 505-512, 514-525, 548-561, 566-576, 584-596, 619-626, 638-645, 649-659, 661-680, 699-708, 714-720, 753-759, 766-772, 775-781, 801-808, 202-218, 282-299, 339-350 and 617-628 of Seq ID No 243; 5-33, 52-62, 87-101, 111-135, 137-143, 145-152, 190-202, 209-221, 233-245, 253-270 and 151-215 of Seq ID No 244; 19-29, 32-39, 42-48, 75-94, 124-135, 137-145, 152-160, 176-182, 193-203, 215-236, 266-273, 275-291, 297-306, 311-319, 322-342, 348-360, 369-378, 394-401 and 48-64 of Seq ID No 245; 4-11, 13-33, 36-43, 53-63, 65-80, 112-129, 134-141, 143-155, 157-168, 178-188, 191-199, 201-207, 215-229, 242-255, 263-270, 283-315, 320-329, 333-338, 340-349, 412-426, 465-478, 485-490, 498-512, 540-554 and 390-516 of Seq ID No 246; 4-18, 23-32, 41-47, 54-70, 88-99, 104-111, 118-138, 143-148, 150-162, 168-175, 181-188, 203-211, 214-220, 227-245, 251-268, 275-281, 287-296, 323-333 and 1-90 of Seq ID No 247; 8-34, 38-49, 72-83, 85-91, 94-104, 112-125, 134-142, 148-168, 181-189, 191-198, 202-214, 222-233, 242-254, 256-262, 273-278, 287-294, 314-325 and 141-159 of Seq ID No 248; 4-24, 30-36, 47-75, 82-105, 124-134, 151-157, 192-202, 208-214, 219-226, 234-247, 285-290, 318-324, 332-340, 343-349, 380-386, 453-462, 472-478, 484-501, 531-540, 550-557, 604-612, 620-625, 642-648, 652-671, 64-84, 93-180 and 181-446 of Seq ID No 249; 12-18, 24-32, 68-75, 77-83, 96-101, 109-116, 129-136, 152-164, 175-184, 190-199, 206-215, 224-233, 241-250, 258-264, 273-292, 302-312, 319-331, 334-346, 348-368, 387-395, 408-416, 420-429, 437-452 and 364-374 of Seq ID No 250; 11-28, 36-52, 60-67, 74-79, 108-116 and 61-76 of Seq ID No 251; 20-27, 38-49, 69-74, 84-107, 138-145, 161-168, 179-195, 210-226, 228-252, 267-281, 283-296, 305-311, 333-340, 342-356, 361-372, 380-399, 401-414, 458-466, 475-481, 492-507, 515-520 and 146-160 of Seq ID No 252; 43-61, 68-74, 76-90, 120-128, 130-149, 156-161, 164-182, 206-234, 242-252, 269-274, 291-304, 332-345, 349-355, 360-371, 374-388, 434-440, 447-453, 459-465, 469-496, 504-522 and 261-285 of Seq ID No 253; 4-17, 24-30, 37-49, 87-98, 118-124, 126-136, 144-171, 176-188, 206-214, 216-228, 233-240, 246-252, 262-271, 277-297, 307-330, 333-342, 346-352, 355-361, 368-386, 391-400, 413-420, 474-480 and 401-427 of Seq ID No 254; 15-26, 31-46, 51-72, 80-93, 96-109, 131-137, 150-158, 179-185, 189-209, 211-219, 221-234, 241-247, 255-262, 265-271, 283-288 and 173-190 of Seq ID No 255; 28-37, 39-45, 51-58, 77-84, 89-97, 132-148, 171-180, 199-205, 212-218, 220-226, 257-265, 273-300, 307-327, 334-340, 344-365, 385-390, 402-408, 426-436, 450-468, 476-485 and 425-497 of Seq ID No 256; 4-25, 70-76, 80-88, 90-100, 120-128, 162-169, 183-203, 261-277, 279-289, 291-297, 302-308, 321-327, 339-353, 358-377, 392-401, 404-410, 414-422, 443-450, 456-461, 470-488, 490-497, 510-535, 570-611, 618-630, 639-647, 649-660, 668-690, 702-716, 718-724, 737-747, 750-764 and 497-509 of Seq ID No 257; 12-48, 50-64, 99-108, 216-223, 235-241, 244-254, 262-274, 287-293, 310-316, 320-326, 361-366, 377-383, 390-395, 408-414, 418-425, 438-444, 462-469, 494-505, 524-530, 536-547, 551-566, 592-598, 601-613, 678-685, 687-695, 709-717, 727-737, 751-757, 760-765, 772-778, 782-788, 801-807, 822-830, 859-868, 870-878, 884-890, 898-903, 909-919, 953-969, 973-980, 990-1000, 1002-1019, 1041-1047, 1059-1065, 1090-1095, 1116-1127, 1130-1139, 1143-1149, 1151-1168, 1178-1183, 1188-1195, 1197-1209, 1213-1220, 1226-1234, 1236-1247, 1255-1274, 1276-1282, 76-100, 270-284, 309-438, 493-505, 786-942 and 947-967 of Seq ID No 258; 4-9, 24-34, 46-95, 97-109, 119-130 and 138-156 of Seq ID No 259; 9-26, 28-35, 43-53, 55-68, 83-92, 99-105, 110-135, 139-149, 157-162, 164-170, 173-183, 193-208, 210-230, 239-245, 253-259, 263-271, 293-305, 310-320, 322-331, 336-343, 351-364, 367-376, 92-107 and 154-173 of Seq ID No 260; 19-39, 52-62, 108-117, 145-152, 160-168, 194-203, 229-240, 252-268, 280-287, 308-316, 333-339, 383-390, 403-412, 414-424, 438-445, 464-472, 479-484, 489-505, 510-526 and 247-260 of Seq ID No 261; 5-17, 25-52, 60-77, 105-113, 118-125, 162-167, 228-234, 272-279, 328-334, 341-357, 381-395, 400-406, 512-518, 557-569, 586-592, 645-651, 690-695, 701-709, 720-726, 733-743, 751-758, 781-786, 879-886, 929-934, 939-944, 952-960, 965-975, 994-1001, 1039-1045, 1102-1109, 1164-1181, 1198-1206, 1223-1229, 1253-1259, 1283-1292, 1312-1317, 1339-1349, 1360-1370, 1389-1398, 1400-1412, 1452-1465, 1470-1484, 1490-1497, 1519-1525, 1554-1564, 1578-1591, 1623-1636, 1638-1646, 1669-1679, 1685-1697, 1704-1711, 1713-1720, 1730-1736, 1738-1749, 1756-1764, 1778-1786, 1796-1803, 1817-1826, 1849-1866, 1975-1993, 2017-2032, 2044-2053, 2070-2086, 2091-2109, 2116-2127, 2156-2167, 2182-2188, 2197-2202, 2244-2252, 2281-2287, 2290-2307, 2350-2361, 2383-2404, 2425-2433, 2445-2455, 2495-2505 and 394-549 of Seq ID No 262; 9-24, 31-53, 57-67, 69-79, 84-114, 133-141, 144-172, 178-186 and 13-46 of Seq ID No 263; 4-25, 27-35, 43-52, 59-70, 79-91, 115-130, 136-152, 154-163, 170-179 and 1-58 of Seq ID No 264; 4-30, 49-55, 71-80, 96-105, 111-126, 139-146, 149-162, 239-245, 279-285, 290-296, 300-307, 331-337, 343-350 and 250-351 of Seq ID No 265; 9-27, 34-41, 43-51, 92-111, 114-120, 123-131, 139-150, 156-171, 176-186, 188-204, 229-241, 252-258, 266-279, 288-297, 319-334, 338-348, 373-379, 389-398, 431-439, 479-484 and 214-398 of Seq ID No 266; 4-15, 18-27, 47-52, 68-83, 91-97, 104-110, 115-121, 139-147, 157-164, 198-206, 227-236, 241-254, 264-273, 278-289, 311-320, 353-361, 372-383, 405-420, 426-434 and 232-386 of Seq ID No 267; 4-10, 24-34, 91-97, 129-141, 156-163, 184-190, 205-219, 229-235, 256-273, 278-285 and 93-116 of Seq ID No 268; 7-29, 35-54, 71-83, 85-91, 104-111, 122-134, 138-144, 146-154, 158-174, 177-183, 186-201, 207-215, 223-235, 240-247, 262-273, 275-283, 287-292 and 48-66 of Seq ID No 269; 7-27, 31-47, 49-70, 75-102, 110-149, 157-171, 217-223, 235-251, 294-302, 358-364, 367-375, 387-393, 395-412, 423-430, 441-451, 456-470, 472-486, 488-495, 499-509, 515-529, 536-549, 556-570, 574-603, 607-615, 625-633, 642-658, 670-676, 683-702, 708-716, 720-726, 747-756, 763-784, 803-812, 815-826 and 475-490 of Seq ID No 270; 7-22, 30-38, 53-59, 64-75, 83-95, 97-112, 120-131, 133-142, 145-151, 154-166, 172-180, 189-203, 227-238, 277-287, 9-156 and 174-287 of Seq ID No 271; 13-23, 25-32, 111-117, 150-164, 185-193, 207-212, 216-224, 230-236, 263-272, 304-311, 342-348, 374-385, 391-407, 444-458, 480-487, 489-499, 523-542, 544-558, 572-579, 620-640, 686-696, 703-710, 742-755, 765-772, 817-822, 830-837, 865-872, 931-937 and 66-86 of Seq ID No 272; 4-27, 49-56, 62-70, 86-92, 121-127, 151-163, 170-182, 195-202, 212-226, 237-243 and 234-254 of Seq ID No 273; 4-10, 13-24, 39-51, 62-78, 92-104, 107-117, 134-141, 156-161, 166-181, 210-216, 222-229, 256-266, 273-280, 297-304, 313-330, 336-349, 371-376, 433-439, 443-448, 488-493, 506-515, 527-534, 560-572, 575-583, 587-593 and 252-483 of Seq ID No 274; 4-15, 21-38, 45-56, 81-95, 102-108, 118-130, 133-147, 152-162, 166-171, 199-204, 211-218, 230-240, 253-261, 274-283, 288-294, 312-317, 325-336, 344-357, 391-414 and 24-146 of Seq ID No 275; 26-31, 38-56, 65-82, 90-101, 112-119, 123-153, 175-188, 197-216, 234-242, 249-265, 273-286, 290-305, 327-335, 338-346, 361-372, 394-404 and 290-306 of Seq ID No 276; 17-26, 43-48, 50-73, 81-93, 95-107, 139-146, 158-168, 171-176, 190-196, 202-212, 216-223, 243-266, 274-282, 308-313, 324-330, 344-378, 380-387, 403-422, 427-443, 448-455, 457-465, 491-515, 517-528, 553-567, 589-599, 610-617, 642-648, 670-697, 709-717, 726-743, 745-759, 769-803, 807-823, 840-849 and 820-851 of Seq ID No 277; 4-18, 39-48, 53-63, 66-90, 102-117, 125-134, 137-145, 156-162, 169-197, 26-40 and 56-80 of Seq ID No 278; 21-33, 36-42, 49-60, 68-76, 91-105, 123-130, 141-161, 169-178, 185-190, 192-199, 205-214, 223-233, 239-247, 260-269, 284-293, 300-314, 324-352, 357-364, 373-382, 389-403, 420-432, 438-446, 466-471, 477-484, 503-509, 549-556, 558-576, 600-623, 625-635, 654-661, 663-669, 671-687, 702-716, 735-741, 744-750, 757-766, 776-786, 807-815, 824-832, 854-860, 863-897, 909-915, 920-946, 952-959, 982-997, 1024-1038, 1049-1055, 1071-1085, 1104-1113, 1121-1132, 1138-1150, 1187-1196, 1212-1221, 1227-1236, 1257-1262, 1264-1278, 1282-1294, 1307-1318, 1353-1370, 1382-1388, 1396-1409, 1434-1440, 1446-1454, 1465-1478, 1485-1513, 1516-1529, 1540-1545, 1563-1568, 1575-1593, 1607-1616, 1628-1645, 1648-1661, 1676-1682, 1689-1697, 1713-1719, 1739-1749, 1753-1758, 1763-1774, 1797-1803, 1807-1846, 1855-1874, 1877-1891, 1893-1907, 1912-1925, 1931-1943, 1955-1965, 1976-1990, 2032-2043, 2045-2051, 2099-2105, 2131-2138, 2161-2179, 2188-2199, 2205-2216, 2219-2227, 2235-2245, 2247-2267, 2277-2288, 2294-2304, 2314-2326, 2346-2358, 2365-2377, 2383-2402, 2407-2423, 2437-2450, 2454-2473, 2489-2497, 2525-2531, 2557-2570, 2580-2587, 2589-2599, 2621-2641, 2647-2653, 2661-2677, 2685-2690, 2697-2717, 2722-2733, 2739-2777, 2786-2793, 2801-2808, 2811-2822, 2825-2835, 2838-2845, 2859-2871, 2877-2883, 213-344, 954-1080 and 2524-2733 of Seq ID No 279; 10-16, 18-23, 28-41, 63-69, 77-91, 101-109, 118-136, 146-153, 155-162, 168-179, 192-207, 217-226, 229-235, 239-254, 279-286, 294-307, 313-319, 334-341, 344-353, 363-377, 390-396 and 178-328 of Seq ID No 280; 18-42, 68-84, 89-95, 100-105, 107-115, 125-135, 154-177, 189-195, 205-228, 236-243, 252-259, 279-300, 309-316, 323-331, 340-351, 353-364, 377-402 and 85-97 of Seq ID No 281; 4-18, 26-32, 66-76, 100-126, 151-159, 178-186, 188-194, 200-210, 241-248, 253-259, 262-279, 284-291, 307-313, 315-322, 327-337, 376-386, 399-407, 432-441, 467-473, 487-497, 499-505, 543-549, 560-568, 585-593, 598-604, 608-614, 630-642, 647-653, 690-703, 717-730, 21-200 and 468-480 of Seq ID No 282; 17-49, 52-58, 62-73, 78-97, 100-117, 122-172, 185-190, 193-217, 225-236 and 33-42 of Seq ID No 283; 7-39, 50-58, 73-89, 96-107, 109-120, 126-142, 152-170, 178-202, 205-211, 224-244, 249-259, 261-270, 300-310, 312-325 and 158-169 of Seq ID No 284; 4-31, 40-64, 71-82, 85-92, 102-124, 126-139, 147-152, 159-173, 176-188, 195-207, 210-216, 234-241, 249-256, 258-276, 279-293, 296-302, 310-315, 349-356, 363-378, 380-403, 411-426, 435-441, 448-459, 463-476, 488-494 and 201-221 of Seq ID No 285; 5-13, 15-74, 87-104, 107-120, 123-129, 136-145, 150-191, 193-206, 227-248, 250-264, 278-302, 304-323, 332-378, 384-407, 409-419, 425-457, 462-471, 474-497, 511-545, 555-564, 571-578, 585-598, 640-647, 669-675, 682-691, 693-705, 729-743, 752-761, 772-780, 786-804, 808-818, 822-846, 858-880, 884-900, 910-939, 941-947, 962-971, 973-988, 998-1003, 1007-1027 and 236-259 of Seq ID No 286; 4-19, 27-8, 81-111, 121-160 and 60-79 of Seq ID No 287; 4-37, 40-46, 52-57, 199-205, 222-229, 236-244, 250-267, 269-282 and 27-197 of Seq ID No 288; 4-16, 24-30, 32-38, 63-75, 86-92, 98-111, 113-126, 160-165, 170-180, 198-204, 227-233, 239-245, 253-273, 308-314, 352-365, 382-387, 395-403, 423-429, 472-482, 484-493, 501-507, 518-526, 536-541, 543-550, 556-562, 586-600, 626-633, 649-661, 680-688 and 546-559 of Seq ID No 289; 16-33, 48-59, 63-71, 77-92, 94-109, 117-124, 139-151, 169-181, 184-227, 233-249, 251-261, 263-275, 282-294, 297-321, 326-332, 341-355, 383-399 and 258-272 of Seq ID No 290; 11-26, 31-39, 43-52, 55-62, 64-70, 80-94, 123-133, 135-141, 172-181, 185-206, 209-218, 224-230, 238-244, 251-262, 264-271, 290-301, 306-324, 333-340, 350-357, 367-375, 390-397, 434-441, 443-448, 77-226 and 350-429 of Seq ID No 291; 4-13, 22-27, 31-45, 50-59, 72-96, 99-114, 131-141, 143-150, 159-176, 180-186, 189-198, 208-214, 234-253, 271-287, 294-299, 310-366, 382-390, 398-416, 424-443 and 283-305 of Seq ID No 292; 9-26, 30-53, 62-72, 86-95, 112-122, 136-145, 153-160, 209-221, 227-237, 241-268, 281-288, 291-298, 308-314, 321-328, 336-346, 351-379, 388-397, 409-416, 423-433, 443-481, 511-519 and 213-232 of Seq ID No 293; 12-18, 25-31, 38-50, 59-67, 71-82, 96-126 and 76-88 of Seq ID No 294; 4-25, 39-44, 64-71, 74-88, 100-113, 128-138, 151-162, 164-177, 185-190, 204-213, 233-239, 246-254, 281-286, 293-306, 309-318, 333-347, 349-359, 385-398, 404-423, 458-465, 477-484, 490-499, 501-533, 554-566, 582-590, 596-616, 624-629, 631-639, 654-680, 694-720, 735-743 and 2-100 of Seq ID No 295; 4-16, 36-41, 52-75, 98-107, 109-117, 122-128, 133-139, 141-155, 159-165, 169-182, 187-193, 195-201, 211-224, 230-236, 247-269, 278-290 and 75-92 of Seq ID No 296; 7-21, 25-33, 37-43, 87-94, 103-120, 131-147, 168-174, 197-203, 207-212, 227-237, 247-257, 263-271, 279-287, 298-306, 320-325, 332-340, 363-374, 379-384, 390-401, 403-414, 428-433, 448-457, 462-475, 483-390, 513-519, 525-535, 543-554, 559-566, 571-620, 625-631, 636-642, 659-670, 688-706, 708-723, 770-779, 787-793, 796-807, 820-840, 848-854, 863-874, 895-905, 912-919, 934-942, 968-975, 983-1000, 1012-1019, 1026-1036, 1050-1060, 1064-1070, 1081-1091, 1094-1108, 1112-1118, 1140-1152, 1164-1169, 1172-1180, 1187-1192 and 732-748 of Seq ID No 297; 23-40, 42-59, 66-73, 78-97, 111-128, 130-141, 157-166, 178-183 and 53-71 of Seq ID No 298; 4-27, 38-44, 47-57, 59-85, 99-106, 114-121, 154-166, 181-186, 193-198, 238-244, 253-262, 272-278, 287-299, 314-320, 338-350, 358-368, 382-388, 407-416, 433-446, 456-461, 463-473 and 86-195 of Seq ID No 299; 5-24, 38-59, 64-80, 87-99, 105-126, 134-142, 149-163, 165-179, 181-202, 205-220, 227-233, 243-250, 257-263 and 87-245 of Seq ID No 300; 5-32, 47-53, 66-79, 81-97, 115-151, 155-174, 183-188, 196-210, 215-226, 230-238, 253-258, 263-270, 276-282, 295-301, 304-325, 334-344, 360-390, 397-412, 425-432, 434-462, 478-494, 508-526, 539-564, 571-579, 347-371 and 375-386 of Seq ID No 301; 4-15, 36-44, 49-56, 60-66, 68-82, 84-103, 109-115, 118-141, 147-154, 160-168, 176-185 and 26-39 of Seq ID No 302; 7-13, 23-33 and 13-21 of Seq ID No 303; 2-10 of Seq ID No 304; 4-9, 12-18, 35-42, 49-62 and 6-18 of Seq ID No 305; 19-25 and 1-13 of Seq ID No 306; 15-21, 27-45 and 12-25 of Seq ID No 307; 14-20 and 1-14 of Seq ID No 308; 4-18 and 13-26 of Seq ID No 309; 8-21 and 2-20 of Seq ID No 310; 4-14 and 4-16 of Seq ID No 311; 3-12 of Seq ID No 312; 6-14, 6-25, 35-57 and 2-14 of Seq ID No 313; 6-25, 35-57 and 17-31 of Seq ID No 314; 14-25, 32-46 and 5-19 of Seq ID No 315; 18-31 and 5-16 of Seq ID No 316; 19-24 and 4-26 of Seq ID No 317; 13-21, 29-34, 47-58, 61-73 and 36-47 of Seq ID No 318; 4-15 and 5-24 of Seq ID No 319; 6-18 of Seq ID No 320; 13-20 and 4-13 of Seq ID No 321; 15-23 of Seq ID No 322; 4-9 and 7-21 of Seq ID No 323; 1-10 of Seq ID No 324; 4-14 of Seq ID No 325; 4-17, 35-41, 46-89, 93-98 and 70-88 of Seq ID No 326; 1-13 of Seq ID No 327; 4-16, 26-32 and 25-38 of Seq ID No 328; 8-15, 23-28 and 4-17 of Seq ID No 329; 4-12 and 1-15 of Seq ID No 330; 4-29, 31-42, 52-58 and 6-16 of Seq ID No 331; 4-9, 24-32 and 9-19 of Seq ID No 332; 4-12, 18-27 and 5-18 of Seq ID No 333; 4-11, 37-56, 58-92 and 18-29 of Seq ID No 334; 8-28 and 20-35 of Seq ID No 335; 4-15 of Seq ID No 336; 4-23, 27-39, 55-63 and 35-58 of Seq ID No 337; 6-26, 28-54 and 28-47 of Seq ID No 338; 4-10, 38-52, 58-82 and 30-49 of Seq ID No 339; 4-22, 29-35, 44-50, 53-68, 70-80 and 20-33 of Seq ID No 340; 22-28, 30-36 and 18-33 of Seq ID No 341; 4-11, 13-21, 25-30 and 20-30 of Seq ID No 342; 10-22 and 10-23 of Seq ID No 343; 4-11 and 9-20 of Seq ID No 344; 14-25, 32-46 and 6-19 of Seq ID No 345; 5-30 and 14-33 of Seq ID No 346; 4-15, 28-35, 46-55, 59-65, 76-84 and 9-24 of Seq ID No 347; 27-33 and 5-19 of Seq ID No 348; 5-13 and 8-18 of Seq ID No 349; 9-22, 24-34 and 21-40 of Seq ID No 350; 4-17, 35-41, 46-89, 93-98 and 71-89 of Seq ID No 351; 4-12, 14-24 and 2-17 of Seq ID No 352; 9-17 and 5-16 of Seq ID No 353; 7-41, 48-58, 63-75, 80-89 and 43-53 of Seq ID No 354; 4-22, 25-30 and 4-14 of Seq ID No 355; 4-55 and 18-33 of Seq ID No 356; 262-280 of Seq ID No 179; 131-146 of Seq ID No 186; 207-224 of Seq ID No 188; 27-50, 203-217 and 313-325 of Seq ID No 189; 110-129 of Seq ID No 192; 156-179, 174-197, 192-215, 210-233, 228-251 and 246-267 of Seq ID No 190; 377-400 of Seq ID No 196; 34-43, 234-257 and 350-367 of Seq ID No 203; 304-327 of Seq ID No 207; 25-48, 43-66 and 61-82 of Seq ID No 222; 398-421, 416-439, 434-457, 452-475, 470-493, 488-511, 506-529, 524-547, 621-644, 639-664, 707-730, 725-748, 743-766, 761-784, 779-802, 797-820, 984-1007, 1002-1025, 1020-1043, 1038-1061, 1056-1079, 1074-1097, 1092-1115, 1286-1309, 1304-1327, 1322-1345, 1340-1363, 1358-1381, 1376-1399, 1394-1417, 1412-1435, 1430-1453, 1448-1471, 1466-1489 and 1484-1507 of Seq ID No 226; 188-211, 206-229, 224-247, 242-265, 260-283 and 278-296 of Seq ID No 227; 56-79 and 122-132 of Seq ID No 229; 35-46 of Seq ID No 231; 178-201, 196-219, 214-237, 232-255, 250-273, 268-291, 379-402, 397-420, 415-438, 433-456, 451-474, 642-665, 660-683, 678-701, 696-719, 714-737, 732-755, 750-773, 768-791, 899-922, 917-940, 935-958, 1037-1060, 1055-1078, 1073-1096 and 1091-1114 of Seq ID No 232; 330-346 of Seq ID No 233; 571-594, 589-612, 607-630, 625-648, 643-666 and 661-684 of Seq ID No 242; 188-207 of Seq ID No 244; 61-84, 308-331, 326-349, 344-367, 362-385, 380-403 and 398-421 of Seq ID No 249; 79-98, 345-366, 844-867, 870-887 and 890-905 of Seq ID No 258; 94-109 of Seq ID No 268; 188-207 of Seq ID No 272; 290-306 of Seq ID No 276; 826-849 of Seq ID No 277; 228-252, 247-270, 265-288, 283-306, 301-324, 955-978, 973-996, 991-1014, 1009-1032, 1027-1050, 1045-1068, 2533-2556, 2551-2574, 2569-2592, 2587-2610, 2605-2628 and 2623-2646 of Seq ID No 279; 86-109 and 104-127 of Seq ID No 288; 546-560 of Seq ID No 289; 260-271 of Seq ID No 290; 106-129, 124-147, 142-165, 160-183, 178-201 and 375-398 of Seq ID No 291; 284-307 of Seq ID No 292; 362-385 of Seq ID No 301, and fragments comprising at least 6, preferably more than 8, especially more than 10 aa of said sequences. All these fragments individually and each independently form a preferred selected aspect of the present invention.

[0150] All linear hyperimmune serum reactive fragments of a particular antigen may be identified by analysing the entire sequence of the protein antigen by a set of peptides overlapping by 1 amino acid with a length of at least 10 amino acids. Subsequently, non-linear epitopes can be identified by analysis of the protein antigen with hyperimmune sera using the expressed full-length protein or domain polypeptides thereof. Assuming that a distinct domain of a protein is sufficient to form the 3D structure independent from the native protein, the analysis of the respective recombinant or synthetically produced domain polypeptide with hyperimmune serum would allow the identification of conformational epitopes within the individual domains of multi-domain proteins. For those antigens where a domain possesses linear as well as conformational epitopes, competition experiments with peptides corresponding to the linear epitopes may be used to confirm the presence of conformational epitopes.

[0151] It will be appreciated that the invention also relates to, among others, nucleic acid molecules encoding the aforementioned fragments, nucleic acid molecules that hybridise to nucleic acid molecules encoding the fragments, particularly those that hybridise under stringent conditions, and nucleic acid molecules, such as PCR primers, for amplifying nucleic acid molecules that encode the fragments. In these regards, preferred nucleic acid molecules are those that correspond to the preferred fragments, as discussed above.

[0152] The present invention also relates to vectors, which comprise a nucleic acid molecule or nucleic acid molecules of the present invention, host cells which are genetically engineered with vectors of the invention and the production of hyperimmune serum reactive antigens and fragments thereof by recombinant techniques.

[0153] A great variety of expression vectors can be used to express a hyperimmune serum reactive antigen or fragment thereof according to the present invention. Generally, any vector suitable to maintain, propagate or express nucleic acids to express a polypeptide in a host may be used for expression in this regard. In accordance with this aspect of the invention the vector may be, for example, a plasmid vector, a single or double-stranded phage vector, a single or double-stranded RNA or DNA viral vector. Starting plasmids disclosed herein are either commercially available, publicly available, or can be constructed from available plasmids by routine application of well-known, published procedures. Preferred among vectors, in certain respects, are those for expression of nucleic acid molecules and hyperimmune serum reactive antigens or fragments thereof of the present invention. Nucleic acid constructs in host cells can be used in a conventional manner to produce the gene product encoded by the recombinant sequence. Alternatively, the hyperimmune serum reactive antigens and fragments thereof of the invention can be synthetically produced by conventional peptide synthesizers. Mature proteins can be expressed in mammalian cells, yeast, bacteria, or other cells under the control of appropriate promoters. Cell-free translation systems can also be employed to produce such proteins using RNAs derived from the DNA construct of the present invention.

[0154] Host cells can be genetically engineered to incorporate nucleic acid molecules and express nucleic acid molecules of the present invention. Representative examples of appropriate hosts include bacterial cells, such as streptococci, staphylococci, E. coli, Streptomyces and Bacillus subtillis cells; fungal cells, such as yeast cells and Aspergillus cells; insect cells such as Drosophila S2 and Spodoptera Sf9 cells; animal cells such as CHO, COS, Hela, C127, 3T; 3, BHK, 293 and Bowes melanoma cells; and plant cells.

[0155] The invention also provides a process for producing a H. pylori hyperimmune serum reactive antigen and a fragment thereof comprising expressing from the host cell a hyperimmune serum reactive antigen or fragment thereof encoded by the nucleic acid molecules provided by the present invention. The invention further provides a process for producing a cell, which expresses a H. pylori hyperimmune serum reactive antigen or a fragment thereof comprising transforming or transfecting a suitable host cell with the vector according to the present invention such that the transformed or transfected cell expresses the polypeptide encoded by the nucleic acid contained in the vector.

[0156] The polypeptide may be expressed in a modified form, such as a fusion protein, and may include not only secretion signals but also additional heterologous functional regions. Thus, for instance, a region of additional amino acids, particularly charged amino acids, may be added to the N- or C-terminus of the polypeptide to improve stability and persistence in the host cell, during purification or during subsequent handling and storage. Also, regions may be added to the polypeptide to facilitate purification. Such regions may be removed prior to final preparation of the polypeptide. The addition of peptide moieties to polypeptides to engender secretion or excretion, to improve stability or to facilitate, purification, among others, are familiar and routine techniques in the art. A preferred fusion protein comprises a heterologous region from immunoglobulin that is useful to solubilize or purify polypeptides. For example, EP-A-O 464 533 (Canadian counterpart 2045869) discloses fusion proteins comprising various portions of constant region of immunoglobin molecules together with another protein or part thereof. In drug discovery, for example, proteins have been fused with antibody Fc portions for the purpose of high-throughout screening assays to identify antagonists. See for example, {Bennett, D. et al., 1995} and {Johanson, K et al., 1995}.

[0157] The H. pylori hyperimmune serum reactive antigen or a fragment thereof can be recovered and purified from recombinant cell cultures by well-known methods including ammonium sulfate or ethanol precipitation, acid extraction, anion or cation exchange chromatography, phosphocellulose chromatography, hydrophobic interaction chromatography, hydroxylapatite chromatography and lectin chromatography.

[0158] The hyperimmune serum reactive antigens and fragments thereof according to the present invention can be produced by chemical synthesis as well as by biotechnological means. The latter comprise the transfection or transformation of a host cell with a vector containing a nucleic acid according to the present invention and the cultivation of the transfected or transformed host cell under conditions, which are known to the ones skilled in the art. The production method may also comprise a purification step in order to purify or isolate the polypeptide to be manufactured. In a preferred embodiment the vector is a vector according to the present invention.

[0159] The hyperimmune serum reactive antigens and fragments thereof according to the present invention may be used for the detection of the organism or organisms in a sample containing these organisms or polypeptides derived thereof. Preferably such detection is for diagnosis, more preferable for the diagnosis of a disease, most preferably for the diagnosis of diseases related or linked to the presence or abundance of Gram-negative bacteria, especially bacteria selected from the group comprising Helicobacter, Campylobacter and Arcobacter. More preferably, the microorganisms are selected from the group comprising Helicobacter cinaedi and Helicobacter fanneliae, especially the microorganism is Helicobacter pylori.

[0160] The present invention also relates to diagnostic assays such as quantitative and diagnostic assays for detecting levels of the hyperimmune serum reactive antigens and fragments thereof of the present invention in cells and tissues, including determination of normal and abnormal levels. Thus, for instance, a diagnostic assay in accordance with the invention for detecting over-expression of the polypeptide compared to normal control tissue samples may be used to detect the presence of an infection, for example, and to identify the infecting organism. Assay techniques that can be used to determine levels of a polypeptide, in a sample derived from a host are well-known to those of skill in the art. Such assay methods include radioimmunoassays, competitive-binding assays, Western Blot analysis and ELISA assays. Among these, ELISAs frequently are preferred. An ELISA assay initially comprises preparing an antibody specific to the polypeptide, preferably a monoclonal antibody. In addition, a reporter antibody generally is prepared which binds to the monoclonal antibody. The reporter antibody is attached to a detectable reagent such as radioactive, fluorescent or enzymatic reagent, such as horseradish peroxidase enzyme.

[0161] The hyperimmune serum reactive antigens and fragments thereof according to the present invention may also be used for the purpose of or in connection with an array. More particularly, at least one of the hyperimmune serum reactive antigens and fragments thereof according to the present invention may be immobilized on a support. Said support typically comprises a variety of hyperimmune serum reactive antigens and fragments thereof whereby the variety may be created by using one or several of the hyperimmune serum reactive antigens and fragments thereof according to the present invention and/or hyperimmune serum reactive antigens and fragments thereof being different. The characterizing feature of such array as well as of any array in general is the fact that at a distinct or predefined region or position on said support or a surface thereof, a distinct polypeptide is immobilized. Because of this any activity at a distinct position or region of an array can be correlated with a specific polypeptide. The number of different hyperimmune serum reactive antigens and fragments thereof immobilized on a support may range from as little as 10 to several 1000 different hyperimmune serum reactive antigens and fragments thereof. The density of hyperimmune serum reactive antigens and fragments thereof per cm² is in a preferred embodiment as little as 10 peptides/polypeptides per cm² to at least 400 different peptides/polypeptides per cm² and more particularly at least 1000 different hyperimmune serum reactive antigens and fragments thereof per cm².

[0162] The manufacture of such arrays is known to the one skilled in the art and, for example, described in U.S. Pat. No. 5,744,309. The array preferably comprises a planar, porous or non-porous solid support having at least a first surface. The hyperimmune serum reactive antigens and fragments thereof as disclosed herein, are immobilized on said surface. Preferred support materials are, among others, glass or cellulose. It is also within the present invention that the array is used for any of the diagnostic applications described herein. Apart from the hyperimmune serum reactive antigens and fragments thereof according to the present invention also the nucleic acid molecules according to the present invention may be used for the generation of an array as described above. This applies as well to an array made of antibodies, preferably monoclonal antibodies as, among others, described herein.

[0163] In a further aspect the present invention relates to an antibody directed to any of the hyperimmune serum reactive antigens and fragments thereof, derivatives or fragments thereof according to the present invention. The present invention includes, for example, monoclonal and polyclonal antibodies, chimeric, single chain, and humanized antibodies, as well as Fab fragments, or the product of a Fab expression library. It is within the present invention that the antibody may be chimeric, i.e. that different parts thereof stem from different species or at least the respective sequences are taken from different species.

[0164] Antibodies generated against the hyperimmune serum reactive antigens and fragments thereof corresponding to a sequence of the present invention can be obtained by direct injection of the hyperimmune serum reactive antigens and fragments thereof into an animal or by administering the hyperimmune serum reactive antigens and fragments thereof to an animal, preferably a non-human. The antibody so obtained will then bind the hyperimmune serum reactive antigens and fragments thereof itself. In this manner, even a sequence encoding only a fragment of a hyperimmune serum reactive antigen and fragments thereof can be used to generate antibodies binding the whole native hyperimmune serum reactive antigen and fragments thereof. Such antibodies can then be used to isolate the hyperimmune serum reactive antigens and fragments thereof from tissue expressing those hyperimmune serum reactive antigens and fragments thereof.

[0165] For preparation of monoclonal antibodies, any technique known in the art, which provides antibodies produced by continuous cell line cultures can be used. (as described originally in {Kohler, G. et al., 1975}.

[0166] Techniques described for the production of single chain antibodies (U.S. Pat. No. 4,946,778) can be adapted to produce single chain antibodies to immunogenic hyperimmune serum reactive antigens and fragments thereof according to this invention. Also, transgenic mice, or other organisms such as other mammals, may be used to express humanized antibodies to immunogenic hyperimmune serum reactive antigens and fragments thereof according to this invention.

[0167] Alternatively, phage display technology or ribosomal display could be utilized to select antibody genes with binding activities towards the hyperimmune serum reactive antigens and fragments thereof either from repertoires of PCR amplified v-genes of lymphocytes from humans screened for possessing respective target antigens or from naïve libraries {McCafferty, J. et al., 1990}; {Marks, J. et al., 1992}. The affinity of these antibodies can also be improved by chain shuffling {Clackson, T. et al., 1991}.

[0168] If two antigen binding domains are present, each domain may be directed against a different epitope—termed ‘bispecific’ antibodies.

[0169] The above-described antibodies may be employed to isolate or to identify clones expressing the hyperimmune serum reactive antigens and fragments thereof or purify the hyperimmune serum reactive antigens and fragments thereof of the present invention by attachment of the antibody to a solid support for isolation and/or purification by affinity chromatography.

[0170] Thus, among others, antibodies against the hyperimmune serum reactive antigens and fragments thereof of the present invention may be employed to inhibit and/or treat infections, particularly bacterial infections and especially infections arising from H. pylori.

[0171] Hyperimmune serum reactive antigens and fragments thereof include antigenically, epitopically or immunologically equivalent derivatives, which form a particular aspect of this invention. The term “antigenically equivalent derivative” as used herein encompasses a hyperimmune serum reactive antigen and fragments thereof or its equivalent which will be specifically recognized by certain antibodies which, when raised to the protein or hyperimmune serum reactive antigen and fragments thereof according to the present invention, interfere with the interaction between pathogen and mammalian host. The term “immunologically equivalent derivative” as used herein encompasses a peptide or its equivalent which when used in a suitable formulation to raise antibodies in a vertebrate, the antibodies act to interfere with the interaction between pathogen and mammalian host.

[0172] The hyperimmune serum reactive antigens and fragments thereof, such as an antigenically or immunologically equivalent derivative or a fusion protein thereof can be used as an antigen to immunize a mouse or other animal such as a rat or chicken. The fusion protein may provide stability to the hyperimmune serum reactive antigens and fragments thereof. The antigen may be associated, for example by conjugation, with an immunogenic carrier protein, for example bovine serum albumin (BSA) or keyhole limpet haemocyanin (KLH). Alternatively, an antigenic peptide comprising multiple copies of the protein or hyperimmune serum reactive antigen and fragments thereof, or an antigenically or immunologically equivalent hyperimmune serum reactive antigen and fragments thereof, may be sufficiently antigenic to improve immunogenicity so as to obviate the use of a carrier.

[0173] Preferably the antibody or derivative thereof is modified to make it less immunogenic in the individual. For example, if the individual is human the antibody may most preferably be “humanized”, wherein the complimentarity determining region(s) of the hybridoma-derived antibody has been transplanted into a human monoclonal antibody, for example as described in {Jones, P. et al., 1986} or {Tempest, P. et al., 1991}.

[0174] The use of a polynucleotide of the invention in genetic immunization will preferably employ a suitable delivery method such as direct injection of plasmid DNA into muscle, delivery of DNA complexed with specific protein carriers, coprecipitation of DNA with calcium phosphate, encapsulation of DNA in various forms of liposomes, particle bombardment {Tang D. et al., 1992}, {Eisenbraun, M. et al., 1993} and in vivo infection using cloned retroviral vectors {Seeger, C. et al., 1984}.

[0175] In a further aspect the present invention relates to a peptide binding to any of the hyperimmune serum reactive antigens and fragments thereof according to the present invention, and a method for the manufacture of such peptides whereby the method is characterized by the use of the hyperimmune serum reactive antigens and fragments thereof according to the present invention and the basic steps are known to the one skilled in the art.

[0176] Such peptides may be generated by using methods according to the state of the art such as phage display or ribosome display. In case of phage display, basically a library of peptides is generated, in form of phages, and this kind of library is contacted with the target molecule, in the present case a hyperimmune serum reactive antigen and fragments thereof according to the present invention. Those peptides binding to the target molecule are subsequently removed, preferably as a complex with the target molecule, from the respective reaction. It is known to the one skilled in the art that the binding characteristics, at least to a certain extent, depend on the particularly realized experimental set-up such as the salt concentration and the like. After separating those peptides binding to the target molecule with a higher affinity or a bigger force, from the non-binding members of the library, and optionally also after removal of the target molecule from the complex of target molecule and peptide, the respective peptide(s) may subsequently be characterised. Prior to the characterisation optionally an amplification step is realized such as, e.g. by propagating the peptide encoding phages. The characterisation preferably comprises the sequencing of the target binding peptides. Basically, the peptides are not limited in their lengths, however, preferably peptides having a lengths from about 8 to 20 amino acids are preferably obtained in the respective methods. The size of the libraries may be about 10² to 10¹⁸, preferably 10⁸ to 10¹⁵ different peptides, however, is not limited thereto.

[0177] A particular form of target binding hyperimmune serum reactive antigens and fragments thereof are the so-called “anticalines” which are, among others, described in the German patent application DE 197 42 706.

[0178] In a further aspect the present invention relates to functional nucleic acids interacting with any of the hyperimmune serum reactive antigens and fragments thereof according to the present invention, and a method for the manufacture of such functional nucleic acids whereby the method is characterized by the use of the hyperimmune serum reactive antigens and fragments thereof according to the present invention and the basic steps are known to the one skilled in the art. The functional nucleic acids are preferably aptamers and spiegelmers.

[0179] Aptamers are D-nucleic acids, which are either single stranded or double stranded and which specifically interact with a target molecule. The manufacture or selection of aptamers is, e.g., described in European patent EP 0 533 838. Basically the following steps are realized. First, a mixture of nucleic acids, i.e. potential aptamers, is provided whereby each nucleic acid typically comprises a segment of several, preferably at least eight subsequent randomised nucleotides. This mixture is subsequently contacted with the target molecule whereby the nucleic acid(s) bind to the target molecule, such as based on an increased affinity towards the target or with a bigger force thereto, compared to the candidate mixture. The binding nucleic acid(s) are/is subsequently separated from the remainder of the mixture. Optionally, the thus obtained nucleic acid(s) is amplified using, e.g. polymerase chain reaction. These steps may be repeated several times giving at the end a mixture having an increased ratio of nucleic acids specifically binding to the target from which the final binding nucleic acid is then optionally selected. These specifically binding nucleic acid(s) are referred to as aptamers. It is obvious that at any stage of the method for the generation or identification of the aptamers samples of the mixture of individual nucleic acids may be taken to determine the sequence thereof using standard techniques. It is within the present invention that the aptamers may be stabilized such as, e.g., by introducing defined chemical groups which are known to the one skilled in the art of generating aptamers. Such modification may for example reside in the introduction of an amino group at the 2′-position of the sugar moiety of the nucleotides. Aptamers are currently used as therapeutical agents. However, it is also within the present invention that the thus selected or generated aptamers may be used for target validation and/or as lead substance for the development of medicaments, preferably of medicaments based on small molecules. This is actually done by a competition assay whereby the specific interaction between the target molecule and the aptamer is inhibited by a candidate drug whereby upon replacement of the aptamer from the complex of target and aptamer it may be assumed that the respective drug candidate allows a specific inhibition of the interaction between target and aptamer, and if the interaction is specific, said candidate drug will, at least in principle, be suitable to block the target and thus decrease its biological availability or activity in a respective system comprising such target. The thus obtained small molecule may then be subject to further derivatisation and modification to optimise its physical, chemical, biological and/or medical characteristics such as toxicity, specificity, biodegradability and bioavailability.

[0180] Spiegelmers and their generation or manufacture is based on a similar principle. The manufacture of spiegelmers is described in international patent application WO 98/08856. Spiegelmers are L-nucleic acids, which means that they are composed of L-nucleotides rather than D-nucleotides as aptamers are. Spiegelmers are characterized by the fact that they have a very high stability in biological systems and, comparable to aptamers, specifically interact with the target molecule against which they are directed. In the process of generating spiegelmers, a heterogeonous population of D-nucleic acids is created and this population is contacted with the optical antipode of the target molecule, in the present case for example with the D-enantiomer of the naturally occurring L-enantiomer of the hyperimmune serum reactive antigens and fragments thereof according to the present invention. Subsequently, those D-nucleic acids are separated which do not interact with the optical antipode of the target molecule. But those D-nucleic acids interacting with the optical antipode of the target molecule are separated, optionally identified and/or sequenced and subsequently the corresponding L-nucleic acids are synthesized based on the nucleic acid sequence information obtained from the D-nucleic acids. These L-nucleic acids which are identical in terms of sequence with the aforementioned D-nucleic acids interacting with the optical antipode of the target molecule, will specifically interact with the naturally occurring target molecule rather than with the optical antipode thereof. Similar to the method for the generation of aptamers it is also possible to repeat the various steps several times and thus to enrich those nucleic acids specifically interacting with the optical antipode of the target molecule.

[0181] In a further aspect the present invention relates to functional nucleic acids interacting with any of the nucleic acid molecules according to the present invention, and a method for the manufacture of such functional nucleic acids whereby the method is characterized by the use of the nucleic acid molecules and their respective sequences according to the present invention and the basic steps are known to the one skilled in the art. The functional nucleic acids are preferably ribozymes, antisense oligonucleotides and siRNA.

[0182] Ribozymes are catalytically active nucleic acids, which preferably consist of RNA which basically comprises two moieties. The first moiety shows a catalytic activity whereas the second moiety is responsible for the specific interaction with the target nucleic acid, in the present case the nucleic acid coding for the hyperimmune serum reactive antigens and fragments thereof according to the present invention. Upon interaction between the target nucleic acid and the second moiety of the ribozyme, typically by hybridisation and Watson-Crick base pairing of essentially complementary stretches of bases on the two hybridising strands, the catalytically active moiety may become active which means that it catalyses, either intramolecularly or intermolecularly, the target nucleic acid in case the catalytic activity of the ribozyme is a phosphodiesterase activity. Subsequently, there may be a further degradation of the target nucleic acid, which in the end results in the degradation of the target nucleic acid as well as the protein derived from the said target nucleic acid. Ribozymes, their use and design principles are known to the one skilled in the art, and, for example described in {Doherty, E. et al., 2001} and {Lewin, A. et al., 2001}.

[0183] The activity and design of antisense oligonucleotides for the manufacture of a medicament and as a diagnostic agent, respectively, is based on a similar mode of action. Basically, antisense oligonucleotides hybridise based on base complementarity, with a target RNA, preferably with a mRNA, thereby activating RNase H. RNase H is activated by both phosphodiester and phosphorothioate-coupled DNA. Phosphodiester-coupled DNA, however, is rapidly degraded by cellular nucleases with the exception of phosphorothioate-coupled DNA. These resistant, non-naturally occurring DNA derivatives do not inhibit RNase H upon hybridisation with RNA. In other words, antisense polynucleotides are only effective as DNA RNA hybride complexes. Examples for this kind of antisense oligonucleotides are described, among others, in US-patent U.S. Pat. No. 5,849,902 and U.S. Pat. No. 5,989,912. In other words, based on the nucleic acid sequence of the target molecule which in the present case are the nucleic acid molecules for the hyperimmune serum reactive antigens and fragments thereof according to the present invention, either from the target protein from which a respective nucleic acid sequence may in principle be deduced, or by knowing the nucleic acid sequence as such, particularly the mRNA, suitable antisense oligonucleotides may be designed base on the principle of base complementarity.

[0184] Particularly preferred are antisense-oligonucleotides, which have a short stretch of phosphorothioate DNA (3 to 9 bases). A minimum of 3 DNA bases is required for activation of bacterial RNase H and a minimum of 5 bases is required for mammalian RNase H activation. In these chimeric oligonucleotides there is a central region that forms a substrate for RNase H that is flanked by hybridising “arms” comprised of modified nucleotides that do not form substrates for RNase H. The hybridising arms of the chimeric oligonucleotides may be modified such as by 2′-O-methyl or 2′-fluoro. Alternative approaches used methylphosphonate or phosphoramidate linkages in said arms. Further embodiments of the antisense oligonucleotide useful in the practice of the present invention are P-methoxyoligonucleotides, partial P-methoxyoligodeoxyribonucleotides or P-methoxyoligonucleotides.

[0185] Of particular relevance and usefulness for the present invention are those antisense oligonucleotides as more particularly described in the above two mentioned US patents. These oligonucleotides contain no naturally occurring 5′→3′-linked nucleotides. Rather the oligonucleotides have two types of nucleotides: 2′-deoxyphosphorothioate, which activate RNase H, and 2′-modified nucleotides, which do not. The linkages between the 2′-modified nucleotides can be phosphodiesters, phosphorothioate or P-ethoxyphosphodiester. Activation of RNase H is accomplished by a contiguous RNase H-activating region, which contains between 3 and 5 2′-deoxyphosphorothioate nucleotides to activate bacterial RNase H and between 5 and 10 2′-deoxyphosphorothioate nucleotides to activate eucaryotic and, particularly, mammalian RNase H. Protection from degradation is accomplished by making the 5′ and 3′ terminal bases highly nuclease resistant and, optionally, by placing a 3′ terminal blocking group.

[0186] More particularly, the antisense oligonucleotide comprises a 5′ terminus and a 3′ terminus; and from position 11 to 59 5′→3′-linked nucleotides independently selected from the group consisting of 2′-modified phosphodiester nucleotides and 2′-modified P-alkyloxyphosphotriester nucleotides; and wherein the 5′-terminal nucleoside is attached to an RNase H-activating region of between three and ten contiguous phosphorothioate-linked deoxyribonucleotides, and wherein the 3′-terminus of said oligonucleotide is selected from the group consisting of an inverted deoxyribonucleotide, a contiguous stretch of one to three phosphorothioate 2′-modified ribonucleotides, a biotin group and a P-alkyloxyphosphotriester nucleotide.

[0187] Also an antisense oligonucleotide may be used wherein not the 5′ terminal nucleoside is attached to an RNase H-activating region but the 3′ terminal nucleoside as specified above. Also, the 5′ terminus is selected from the particular group rather than the 3′ terminus of said oligonucleotide.

[0188] The nucleic acids as well as the hyperimmune serum reactive antigens and fragments thereof according to the present invention may be used as or for the manufacture of pharmaceutical compositions, especially vaccines. Preferably such pharmaceutical composition, preferably vaccine is for the prevention or treatment of diseases caused by, related to or associated with H. pylori. In so far another aspect of the invention relates to a method for inducing an immunological response in an individual, particularly a mammal, which comprises inoculating the individual with the hyperimmune serum reactive antigens and fragments thereof of the invention, or a fragment or variant thereof, adequate to produce antibodies to protect said individual from infection, particularly Helicobacter infection and most particularly H. pylori infections.

[0189] Yet another aspect of the invention relates to a method of inducing an immunological response in an individual which comprises, through gene therapy or otherwise, delivering a nucleic acid functionally encoding hyperimmune serum reactive antigens and fragments thereof, or a fragment or a variant thereof, for expressing the hyperimmune serum reactive antigens and fragments thereof, or a fragment or a variant thereof in vivo in order to induce an immunological response to produce antibodies or a cell mediated T cell response, either cytokine-producing T cells or cytotoxic T cells, to protect said individual from disease, whether that disease is already established within the individual or not. One way of administering the gene is by accelerating it into the desired cells as a coating on particles or otherwise.

[0190] A further aspect of the invention relates to an immunological composition which, when introduced into a host capable of having induced within it an immunological response, induces an immunological response in such host, wherein the composition comprises recombinant DNA which codes for and expresses an antigen of the hyperimmune serum reactive antigens and fragments thereof of the present invention. The immunological response may be used therapeutically or prophylactically and may take the form of antibody immunity or cellular immunity such as that arising from CTL or CD4+ T cells.

[0191] The hyperimmune serum reactive antigens and fragments thereof of the invention or a fragment thereof may be fused with a co-protein which may not by itself produce antibodies, but is capable of stabilizing the first protein and producing a fused protein which will have immunogenic and protective properties. This fused recombinant protein preferably further comprises an antigenic co-protein, such as Glutathione-S-transferase (GST) or beta-galactosidase, relatively large co-proteins which solubilise the protein and facilitate production and purification thereof. Moreover, the co-protein may act as an adjuvant in the sense of providing a generalized stimulation of the immune system. The co-protein may be attached to either the amino or carboxy terminus of the first protein.

[0192] Also, provided by this invention are methods using the described nucleic acid molecule or particular fragments thereof in such genetic immunization experiments in animal models of infection with H. pylori. Such fragments will be particularly useful for identifying protein epitopes able to provoke a prophylactic or therapeutic immune response. This approach can allow for the subsequent preparation of monoclonal antibodies of particular value from the requisite organ of the animal successfully resisting or clearing infection for the development of prophylactic agents or therapeutic treatments of H. pylori infection in mammals, particularly humans.

[0193] The hyperimmune serum reactive antigens and fragments thereof may be used as an antigen for vaccination of a host to produce specific antibodies which protect against invasion of bacteria, for example by blocking adherence of bacteria to damaged tissue. Examples of tissue damage include wounds in skin or connective tissue caused e.g. by mechanical, chemical or thermal damage or by implantation of indwelling devices, or wounds in the mucous membranes, such as the mouth, mammary glands, urethra or vagina.

[0194] The present invention also includes a vaccine formulation, which comprises the immunogenic recombinant protein together with a suitable carrier. Since the protein may be broken down in the stomach, it is preferably administered parenterally, including, for example, administration that is subcutaneous, intramuscular, intravenous, intradermal intranasal or transdermal. Formulations suitable for parenteral administration include aqueous and non-aqueous sterile injection solutions which may contain anti-oxidants, buffers, bacteriostats and solutes which render the formulation isotonic with the bodily fluid, preferably the blood, of the individual; and aqueous and non-aqueous sterile suspensions which may include suspending agents or thickening agents. The formulations may be presented in unit-dose or multi-dose containers, for example, sealed ampoules and vials, and may be stored in a freeze-dried condition requiring only the addition of the sterile liquid carrier immediately prior to use. The vaccine formulation may also include adjuvant systems for enhancing the immunogenicity of the formulation, such as oil-in-water systems and other systems known in the art. The dosage will depend on the specific activity of the vaccine and can be readily determined by routine experimentation.

[0195] According to another aspect, the present invention relates to a pharmaceutical composition comprising such a hyperimmune serum-reactive antigen or a fragment thereof as provided in the present invention for H. pylori. Such a pharmaceutical composition may comprise one, preferably at least two or more hyperimmune serum reactive antigens or fragments thereof against H. pylori. Optionally, such H. pylori hyperimmune serum reactive antigens or fragments thereof may also be combined with antigens against other pathogens in a combination pharmaceutical composition. Preferably, said pharmaceutical composition is a vaccine for preventing or treating an infection caused by H. pylori and/or other pathogens against which the antigens have been included in the vaccine.

[0196] According to a further aspect, the present invention relates to a pharmaceutical composition comprising a nucleic acid molecule encoding a hyperimmune serum-reactive antigen or a fragment thereof as identified above for H. pylori Such a pharmaceutical composition may comprise one or more nucleic acid molecules encoding hyperimmune serum reactive antigens or fragments thereof against H. pylori. Optionally, such H. pylori nucleic acid molecules encoding hyperimmune serum reactive antigens or fragments thereof may also be combined with nucleic acid molecules encoding antigens against other pathogens in a combination pharmaceutical composition. Preferably, said pharmaceutical composition is a vaccine for preventing or treating an infection caused by H. pylori and/or other pathogens against which the antigens have been included in the vaccine.

[0197] The pharmaceutical composition may contain any suitable auxiliary substances, such as buffer substances, stabilisers or further active ingredients, especially ingredients known in connection of pharmaceutical composition and/or vaccine production.

[0198] A preferable carrier/or excipient for the hyperimmune serum-reactive antigens, fragments thereof or a coding nucleic acid molecule thereof according to the present invention is an immunostimulatory compound for further stimulating the immune response to the given hyperimmune serum-reactive antigen, fragment thereof or a coding nucleic acid molecule thereof. Preferably the immunostimulatory compound in the pharmaceutical preparation according to the present invention is selected from the group of polycationic substances, especially polycationic peptides, immunostimulatory nucleic acids molecules, preferably immunostimulatory deoxynucleotides, alum, Freund's complete adjuvants, Freund's incomplete adjuvants, neuroactive compounds, especially human growth hormone, or combinations thereof.

[0199] It is also within the scope of the present invention that the pharmaceutical composition, especially vaccine, comprises apart from the hyperimmune serum reactive antigens, fragments thereof and/or coding nucleic acid molecules thereof according to the present invention other compounds which are biologically or pharmaceutically active. Preferably, the vaccine composition comprises at least one polycationic peptide. The polycationic compound(s) to be used according to the present invention may be any polycationic compound, which shows the characteristic effects according to the WO 97/30721. Preferred polycationic compounds are selected from basic polyppetides, organic polycations, basic polyamino acids or mixtures thereof. These polyamino acids should have a chain length of at least 4 amino acid residues (WO 97/30721). Especially preferred are substances like polylysine, polyarginine and polypeptides containing more than 20%, especially more than 50% of basic amino acids in a range of more than 8, especially more than 20, amino acid residues or mixtures thereof. Other preferred polycations and their pharmaceutical compositions are described in WO 97/30721 (e.g. polyethyleneimine) and WO 99/38528. Preferably these polypeptides contain between 20 and 500 amino acid residues, especially between 30 and 200 residues.

[0200] These polycationic compounds may be produced chemically or recombinantly or may be derived from natural sources.

[0201] Cationic (poly)peptides may also be anti-microbial with properties as reviewed in {Ganz, T., 1999}. These (poly)peptides may be of prokaryotic or animal or plant origin or may be produced chemically or recombinantly (WO 02/13857). Peptides may also belong to the class of defensins (WO 02/13857). Sequences of such peptides can be, for example, found in the Antimicrobial Sequences Database under the following internet address:
[0202] http://www.bbcm.univ.trieste.it/˜tossi/pag2.html

[0203] Such host defence peptides or defensives are also a preferred form of the polycationic polymer according to the present invention. Generally, a compound allowing as an end product activation (or down-regulation) of the adaptive immune system, preferably mediated by APCs (including dendritic cells) is used as polycationic polymer.

[0204] Especially preferred for use as polycationic substances in the present invention are cathelicidin derived antimicrobial peptides or derivatives thereof (International patent application WO 02/13857, incorporated herein by reference), especially antimicrobial peptides derived from mammalian cathelicidin, preferably from human, bovine or mouse.

[0205] Polycationic compounds derived from natural sources include HIV-REV or HIV-TAT (derived cationic peptides, antennapedia peptides, chitosan or other derivatives of chitin) or other peptides derived from these peptides or proteins by biochemical or recombinant production. Other preferred polycationic compounds are cathelin or related or derived substances from cathelin. For example, mouse cathelin is a peptide, which has the amino acid sequence NH₂-RLAGLLRKGGEKIGEKLKKIGOKIKNFFQKLVPQPE-COOH. Related or derived cathelin substances contain the whole or parts of the cathelin sequence with at least 15-20 amino acid residues. Derivations may include the substitution or modification of the natural amino acids by amino acids, which are not among the 20 standard amino acids. Moreover, further cationic residues may be introduced into such cathelin molecules. These cathelin molecules are preferred to be combined with the antigen. These cathelin molecules surprisingly have turned out to be also effective as an adjuvant for an antigen without the addition of further adjuvants. It is therefore possible to use such cathelin molecules as efficient adjuvants in vaccine formulations with or without further immunactivating substances.

[0206] Another preferred polycationic substance to be used according to the present invention is a synthetic peptide containing at least 2 KLK-motifs separated by a linker of 3 to 7 hydrophobic amino acids (International patent application WO 02/32451, incorporated herein by reference).

[0207] The pharmaceutical composition of the present invention may further comprise immunostimulatory nucleic acid(s). Immunostimulatory nucleic acids are e.g. neutral or artificial CpG containing nucleic acids, short stretches of nucleic acids derived from non-vertebrates or in form of short oligonucleotides (ODNs) containing non-methylated cytosine-guanine di-nucleotides (CpG) in a certain base context (e.g. described in WO 96/02555). Alternatively, also nucleic acids based on inosine and cytidine as e.g. described in the WO 01/93903, or deoxynucleic acids containing deoxy-inosine and/or deoxyuridine residues (described in WO 01/93905 and PCT/EP 02/05448, incorporated herein by reference) may preferably be used as immunostimulatory nucleic acids for the present invention. Preferablly, the mixtures of different immunostimulatory nucleic acids may be used according to the present invention.

[0208] It is also within the present invention that any of the aforementioned polycationic compounds is combined with any of the immunostimulatory nucleic acids as aforementioned. Preferably, such combinations are according to the ones as described in WO 01/93905, WO 02/32451, WO 01/54720, WO 01/93903, WO 02/13857 and PCT/EP 02/05448 and the Austrian patent application A 1924/2001, incorporated herein by reference.

[0209] In addition or alternatively such vaccine composition may comprise apart from the hyperimmune serum reactive antigens and fragments thereof, and the coding nucleic acid molecules thereof according to the present invention a neuroactive compound. Preferably, the neuroactive compound is human growth factor as, e.g. described in WO 01/24822. Also preferably, the neuroactive compound is combined with any of the polycationic compounds and/or immunostimulatory nucleic acids as afore-mentioned.

[0210] In a further aspect the present invention is related to a pharmaceutical composition. Such pharmaceutical composition is, for example, the vaccine described herein. Also a pharmaceutical composition is a pharmaceutical composition which comprises any of the following compounds or combinations thereof: the nucleic acid molecules according to the present invention, the hyperimmune serum reactive antigens and fragments thereof according to the present invention, the vector according to the present invention, the cells according to the present invention, the antibody according to the present invention, the functional nucleic acids according to the present invention and the binding peptides such as the anticalines according to the present invention, any agonists and antagonists screened as described herein. In connection therewith any of these compounds may be employed in combination with a non-sterile or sterile carrier or carriers for use with cells, tissues or organisms, such as a pharmaceutical carrier suitable for administration to a subject. Such compositions comprise, for instance, a media additive or a therapeutically effective amount of a hyperimmune serum reactive antigen and fragments thereof of the invention and a pharmaceutically acceptable carrier or excipient. Such carriers may include, but are not limited to, saline, buffered saline, dextrose, water, glycerol, ethanol and combinations thereof. The formulation should suit the mode of administration.

[0211] The pharmaceutical compositions may be administered in any effective, convenient manner including, for instance, administration by topical, oral, anal, vaginal, intravenous, intraperitoneal, intramuscular, subcutaneous, intranasal or intradermal routes among others.

[0212] In therapy or as a prophylactic, the active agent may be administered to an individual as an injectable composition, for example as a sterile aqueous dispersion, preferably isotonic.

[0213] Alternatively the composition may be formulated for topical application, for example in the form of ointments, creams, lotions, eye ointments, eye drops, ear drops, mouthwash, impregnated dressings and sutures and aerosols, and may contain appropriate conventional additives, including, for example, preservatives, solvents to assist drug penetration, and emollients in ointments and creams. Such topical formulations may also contain compatible conventional carriers, for example cream or ointment bases, and ethanol or oleyl alcohol for lotions. Such carriers may constitute from about 1% to about 98% by weight of the formulation; more usually they will constitute up to about 80% by weight of the formulation.

[0214] In addition to the therapy described above, the compositions of this invention may be used generally as a wound treatment agent to prevent adhesion of bacteria to matrix proteins exposed in wound tissue and for prophylactic use in dental treatment as an alternative to, or in conjunction with, antibiotic prophylaxis.

[0215] A vaccine composition is conveniently in injectable form. Conventional adjuvants may be employed to enhance the immune response. A suitable unit dose for vaccination is 0.05-5 μg antigen/per kg of body weight, and such dose is preferably administered 1-3 times and with an interval of 1-3 weeks.

[0216] With the indicated dose range, no adverse toxicological effects should be observed with the compounds of the invention, which would preclude their administration to suitable individuals.

[0217] In a further embodiment the present invention relates to diagnostic and pharmaceutical packs and kits comprising one or more containers filled with one or more of the ingredients of the aforementioned compositions of the invention. The ingredient(s) can be present in a useful amount, dosage, formulation or combination. Associated with such container(s) can be a notice in the form prescribed by a governmental agency regulating the manufacture, use or sale of pharmaceuticals or biological products, reflecting approval by the agency of the manufacture, use or sale of the product for human administration.

[0218] In connection with the present invention any disease related use as disclosed herein such as, e.g. use of the pharmaceutical composition or vaccine, is particularly a disease or diseased condition which is caused by, linked or associated with Helicobacter, more preferably, H. pylori. In connection therewith it is to be noted that H. pylori comprises several strains including those disclosed herein. A disease related, caused or associated with the bacterial infection to be prevented and/or treated according to the present invention includes besides others peptic ulcer and associated cancer in humans.

[0219] In a still further embodiment the present invention is related to a screening method using any of the hyperimmune serum reactive antigens or nucleic acids according to the present invention. Screening methods as such are known to the one skilled in the art and can be designed such that an agonist or an antagonist is screened. Preferably an antagonist is screened which in the present case inhibits or prevents the binding of any hyperimmune serum reactive antigen and fragment thereof according to the present invention to an interaction partner. Such interaction partner can be a naturally occurring interaction partner or a non-naturally occurring interaction partner.

[0220] The invention also provides a method of screening compounds to identify those, which enhance (agonist) or block (antagonist) the function of hyperimmune serum reactive antigens and fragments thereof or nucleic acid molecules of the present invention, such as its interaction with a binding molecule. The method of screening may involve high-throughput.

[0221] For example, to screen for agonists or antagonists, the interaction partner of the nucleic acid molecule and nucleic acid, respectively, according to the present invention, maybe a synthetic reaction mix, a cellular compartment, such as a membrane, cell envelope or cell wall, or a preparation of any thereof, may be prepared from a cell that expresses a molecule that binds to the hyperimmune serum reactive antigens and fragments thereof of the present invention. The preparation is incubated with labelled hyperimmune serum reactive antigens and fragments thereof in the absence or the presence of a candidate molecule, which may be an agonist or antagonist. The ability of the candidate molecule to bind the binding molecule is reflected in decreased binding of the labelled ligand. Molecules which bind gratuitously, i.e., without inducing the functional effects of the hyperimmune serum reactive antigens and fragments thereof, are most likely to be good antagonists. Molecules that bind well and elicit functional effects that are the same as or closely related to the hyperimmune serum reactive antigens and fragments thereof are good agonists.

[0222] The functional effects of potential agonists and antagonists may be measured, for instance, by determining the activity of a reporter system following interaction of the candidate molecule with a cell or appropriate cell preparation, and comparing the effect with that of the hyperimmune serum reactive antigens and fragments thereof of the present invention or molecules that elicit the same effects as the hyperimmune serum reactive antigens and fragments thereof. Reporter systems that may be useful in this regard include but are not limited to colorimetric labelled substrate converted into product, a reporter gene that is responsive to changes in the functional activity of the hyperimmune serum reactive antigens and fragments thereof, and binding assays known in the art.

[0223] Another example of an assay for antagonists is a competitive assay that combines the hyperimmune serum reactive antigens and fragments thereof of the present invention and a potential antagonist with membrane-bound binding molecules, recombinant binding molecules, natural substrates or ligands, or substrate or ligand mimetics, under appropriate conditions for a competitive inhibition assay. The hyperimmune serum reactive antigens and fragments thereof can be labelled such as by radioactivity or a colorimetric compound, such that the molecule number of hyperimmune serum reactive antigens and fragments thereof bound to a binding molecule or converted to product can be determined accurately to assess the effectiveness of the potential antagonist.

[0224] Potential antagonists include small organic molecules, peptides, polypeptides and antibodies that bind to a hyperimmune serum reactive antigen and fragments thereof of the invention and thereby inhibit or extinguish its acitivity. Potential antagonists also may be small organic molecules, a peptide, a polypeptide such as a closely related protein or antibody that binds to the same sites on a binding molecule without inducing functional activity of the hyperimmune serum reactive antigens and fragments thereof of the invention.

[0225] Potential antagonists include a small molecule, which binds to and occupies the binding site of the hyperimmune serum reactive antigens and fragments thereof thereby preventing binding to cellular binding molecules, such that normal biological activity is prevented. Examples of small molecules include but are not limited to small organic molecules, peptides or peptide-like molecules.

[0226] Other potential antagonists include antisense molecules (see {Okano, H. et al., 1991}; OLIGODEOXYNUCLEOTIDES AS ANTISENSE INHIBITORS OF GENE EXPRESSION; CRC Press, Boca Ration, Fla. (1988), for a description of these molecules).

[0227] Preferred potential antagonists include derivatives of the hyperimmune serum reactive antigens and fragments thereof of the invention.

[0228] As used herein the activity of a hyperimmune serum reactive antigen and fragment thereof according to the present invention is its capability to bind to any of its interaction partner or the extent of such capability to bind to its or any interaction partner.

[0229] In a particular aspect, the invention provides the use of the hyperimmune serum reactive antigens and fragments thereof, nucleic acid molecules or inhibitors of the invention to interfere with the initial physical interaction between a pathogen and mammalian host responsible for sequelae of infection. In particular the molecules of the invention may be used: i) in the prevention of adhesion of H. pylori to mammalian extracellular matrix proteins on in-dwelling devices or to extracellular matrix proteins in mucosal wounds; ii) to block protein mediated mammalian cell invasion by, for example, initiating phosphorylation of mammalian tyrosine kinases {Rosenshine, I. et al., 1992} to block bacterial adhesion between mammalian extracellular matrix proteins and bacterial proteins which mediate tissue damage; iv) to block the normal progression of pathogenesis in infections initiated other than by the implantation of in-dwelling devices or by other surgical techniques.

[0230] Each of the DNA coding sequences provided herein may be used in the discovery and development of antibacterial compounds. The encoded protein upon expression can be used as a target for the screening of antibacterial drugs. Additionally, the DNA sequences encoding the amino terminal regions of the encoded protein or Shine-Delgarno or other translation facilitating sequences of the respective mRNA can be used to construct antisense sequences to control the expression of the coding sequence of interest.

[0231] The antagonists and agonists may be employed, for instance, to inhibit diseases arising from infection with Helicobacter, especially H. pylori, such as peptic ulcer disease and gastric cancer.

[0232] In a still further aspect the present invention is related to an affinity device such affinity device comprises as least a support material and any of the hyperimmune serum reactive antigens and fragments thereof according to the present invention, which is attached to the support material. Because of the specificity of the hyperimmune serum reactive antigens and fragments thereof according to the present invention for their target cells or target molecules or their interaction partners, the hyperimmune serum reactive antigens and fragments thereof allow a selective removal of their interaction partner(s) from any kind of sample applied to the support material provided that the conditions for binding are met. The sample may be a biological or medical sample, including but not limited to, fermentation broth, cell debris, cell preparation, tissue preparation, organ preparation, blood, urine, lymph liquid, liquor and the like.

[0233] The hyperimmune serum reactive antigens and fragments thereof may be attached to the matrix in a covalent or non-covalent manner. Suitable support material is known to the one skilled in the art and can be selected from the group comprising cellulose, silicon, glass, aluminium, paramagnetic beads, starch and dextrane.

[0234] The present invention is further illustrated by the following figures, examples and the sequence listing from which further features, embodiments and advantages may be taken. It is to be understood that the present examples are given by way of illustration only and not by way of limitation of the disclosure.

[0235] In connection with the present invention

[0236] FIG. 1 shows the characterization of H. pylori specific human sera.

[0237] FIG. 2 shows the characterization of the small fragment genomic library LHP1-50 from H. pylori isolate KTH-Ca1.

[0238] FIG. 3 shows the characterization of the small fragment genomic library LHP2-50 from H. pylori isolate KTH-Du.

[0239] FIG. 4 shows the selection of bacterial cells by MACS using biotinylated human IgGs.

[0240] Table 1 shows the summary of all screens performed with genomic H. pylori libraries and human serum.

[0241] Table 2 shows the summary of all gene distribution experiments performed with genomic H. pylori DNA from individual isolates and gene specific oligonucleotides.

[0242] Table 3 shows the summary of epitope serology analysis with human sera.

[0243] The figures to which it might be referred to in the specification are described in the following in more details.

[0244] FIG. 1 shows the characterization of human sera for anti-H. pylori antibodies as measured by immune assays. Total anti-H. pylori IgG and IgA antibody levels were measured by standard ELISA using total bacterial lysate prepared from H. pylori KTH Ca1 strain as coating antigen. (A) Serum samples from randomly selected 54 adults were analysed for antibody levels and afterwards interviewed for symptoms (gasctric pain) and previous history of H. pylori infections. Four individuals were identified with high antibody titers without symptoms or disease (S−) and four with acute symptoms or known clinical disease (S+). (B) Sera from patients presenting themselves with typical symptoms of H. pylori diseases were analysed for IgG and IgA levels and grouped based on negative or positive results in the Urease test performed by clinicians. ELISA units are calculated from absorbance readings at two serum dilutions (10.000× and 50.000×). Averages for the two different groups are given. (C) Immunoblot analysis was performed on sera pre-selected by ELISA in order to ensure multiple immune reactivity with protein antigens. Results of a representative experiment using total bacterial lysate prepared from H. pylori KTH Ca1 strain and selected sera at 5.000× dilution are shown. Serum samples are from; Lane 1: a high titer S-individual, Lane 2: a high titer urease-patient, Lane 3 and 4: a high titer urease+patient. Lane 1-3 was developed with anti-human IgG secondary antibody and Lane 4 with anti-human IgA secondary antibody. Mw: molecular weigth markers.

[0245] FIG. 2 shows the fragment size distribution of the KTH-Ca1 H. pylori strain small fragment genomic library, LHP1-50. After sequencing 576 randomly selected clones sequences were trimmed to eliminate vector residues and the number of clones with various genomic fragment sizes were plotted. (B) Graphic illustration of the distribution of the same set of randomly sequenced clones of LHP2-50 over the H. pylori chromosome. Blue circles indicate matching sequences to annotated ORFs in both +/+ and +/− orientations. Red rectangles represent fully matched clones to non-coding chromosomal sequences in both +/+ and +/− orientations. Green diamonds positions all clones with chimeric sequences. Numeric distances in base pairs are indicated over each circular genome for orientation. Partitioning of various clone sets within the library is given in numbers and percentage at the bottom of the figure.

[0246] FIG. 3 shows the fragment size distribution of the KTH-Du H. pylori strain small fragment genomic library, LHP2-50. After sequencing 576 randomly selected clones sequences were trimmed to eliminate vector residues and the number of clones with various genomic fragment sizes were plotted. (B) Graphic illustration of the distribution of the same set of randomly sequenced clones of LHP2-50 over the H. pylori chromosome. Blue circles indicate matching sequences to annotated ORFs in both +/+ and +/− orientations. Red rectangles represent fully matched clones to non-coding chromosomal sequences in both +/+ and +/− orientations. Green diamonds positions all clones with chimeric sequences. Numeric distances in base pairs are indicated over each circular genome for orientation. Partitioning of various clone sets within the library is given in numbers and percentage at the bottom of the figure.

[0247] FIG. 4A shows the MACS selection with biotinylated human IgGs. The LHP1-50 library in pMAL9.1 was screened with 10 μg biotinylated, human serum (P6-IgG) in the first and with 10 μg in the second selection round. As negative control, no serum was added to the library cells for screening. Number of cells selected after the 1^{st} and 2^{nd} elution are shown for each selection round. FIG. 4B shows the reactivity of specific clones (1-26) isolated by bacterial surface display as analysed by Western blot analysis with the human serum (P6-IgG) used for selection by MACS at a dilution of 1:3,000. As a loading control the same blot was also analysed with antibodies directed against the platform protein LamB at a dilution of 1:5,000. LB, Extract from a done expressing LamB without foreign peptide insert.

Table 1: Immunogenic Proteins Identified by Bacterial Surface Display.

[0248] A, 300 bp library of H. pylori KTH Ca1 in fhuA with IC7-IgG (757), B, 300 bp library of H. pylori KTH Ca1 in fhuA with P5-IgG (729), C, 300 bp library of H. pylori KTH Ca1 in fhuA with P9-IgG (441), D, 50 bp library of H. pylori KTH Ca1 in lamB with IC7-IgG (448), E, 50 bp library of H. pylori KTH Ca1 in lamB with P5-IgA (1130), F, 50 bp library of H. pylori KTH Ca1 in lamB with P5-IgG (911), G, 50 bp library of H. pylori KTH Ca1 in lamB with P6-IgA (1135), H, 50 bp library of H. pylori KTH Ca1 in lamB with P6-IgG (844), I, 50 bp library of H. pylori KTH Ca1 in lamB with P9-IgG (1121), J, 300 bp library of H. pylori KTH Du in fhuA with P6-IgG (433), K, 300 bp library of H. pylori KTH Du in fhuA with P8-IgG (550), L, 50 bp library of H. pylori KTH Du in lamB with P6-IgG (1077), M, 50 bp library of H. pylori KTH Du in lamB with P8-IgG (740); *, prediction of antigenic sequences longer than 5 amino acids was performed with the program ANTIGENIC {Kolaskar, A. et al., 1990}.

Table 2: Gene Distribution in H. pylori strains.

[0249] 28 H. pylori strains (including H. pylori KTH-Ca1 and KTH-Du, see example 2) and were tested by PCR with oligonucleotides specific for the genes encoding relevant antigens. The PCR fragment of one selected PCR fragment was sequenced in order to confirm the amplification of the correct DNA fragment. *, number of amino acid substitutions in a H. pylori strain derived from a cancer patient as compared to H. pylori strain KE26695 (aa, amino acids). #, an alternative strain was used for sequencing.

Table 3: Epitope Serology with Human Sera.

[0250] Immune reactivity of individual synthetic peptides representing selected epitopes with individual human sera is shown. Extent of reactivity is colour coded; white: neg (<500), light grey: + (500-650), dark grey: ++ (650-800), and black: +++ (>800). Numbers represent ELISA readings generated by measuring OD₄₀₅ₙₘ at serum dilution 200×. S stands for score, calculated as the sum of all reactivities (addition of the number of all +); P1 to P18 sera are from patients with definitive clinical diagnosis of duodenal or gastric ulcer, N1-4 sera are from healthy adults with high anti-H. pylori antibody titers without clinical symptomes of H. pylori disease. Location of synthetic peptides within the antigenic ORFs according to the genome annotation of H. pylori strain 26695 are given in columns from and to indicating the first and last amino acid residues, respectively. Peptide names: HP0009.1 present in annotated ORF HP0009.

### EXAMPLES

### Example 1

### Characterization and Selection of Human Sera Based Anti-H. pylori Antibodies, Preparation of Antibody Screening Reagents

Experimental Procedures

Enzyme Linked Immune Assay (ELISA).

[0251] ELISA plates (Maxisorb, Millipore) were coated with 5-10 μg/ml total protein diluted in coating buffer (0.1M sodium carbonate pH 9.2). Three dilutions of sera (2,000×, 10,000×, 50,000×) were made in PBS, BSA. Highly specific Horse Radish Peroxidase (HRP)-conjugated anti-human IgG or anti-human IgA secondary antibodies (Southern Biotech) were used according to the manufacturers' recommendations (dilution: 1,000×). Antigen-antibody complexes were quantified by measuring the conversion of the substrate (ABTS) to colored product based on OD₄₀₅ₙₘ readings by automatic ELIAS reader (TECAN SUNRISE).

Preparation of Bacterial Antigen Extracts

[0252] H. pylori KTH DU or KTH Ca1 strains were grown for 48 hours on agar plates, cells collected and lysed by repeated freeze-thaw cycles: incubation on dry ice/ethanol-mixture until frozen (1 min), then thawed at 37° C. (5 min): repeated 3 times. This was followed by sonication and collection of supernatant by centrifugation (3,500 rpm, 15 min, 4° C.).

Immunoblotting

[0253] Total bacterial lysate preparations were prepared from in vitro grown H. pylori KTH DU or KTH Ca1 strains. 10 to 25 μg total protein/lane was separated by SDS-PAGE using the BioRad Mini-Protean 3 Cell electrophoresis system and proteins transferred to nitrocellulose membrane (ECL, Amersham Pharmacia). After overnight blocking in 5% milk, human sera were added at 2,000× dilution, and HRPO labeled anti-human IgG was used for detection.

[0254] Purification of antibodies for genomic screening. Five sera from both the patient and the healthy group were selected based on the overall anti-streptococcal titers for a serum pool used in the screening procedure. Antibodies against E. coli proteins were removed by incubating the heat-inactivated sera with whole cell E. coli cells (DH5alpha, transformed with pHIE11, grown under the same condition as used for bacterial surface display). Highly enriched preparations of IgGs from the pooled, depleted sera were generated by protein G affinity chromatography, according to the manufacturer's instructions (UltraLink Immobilized Protein G, Pierce). IgA antibodies were purified also by affinity chromatography using biotin-labeled anti-human IgA (Southern Biotech) immobilized on Streptavidin-agarose (GIBCO BRL). The efficiency of depletion and purification was checked by SDS-PAGE, Western blotting, ELISA and protein concentration measurements.

Results

[0255] The antibodies produced against H. pylori by the human immune system and present in human sera are indicative of the in vivo expression of the antigenic proteins and their immunogenicity. These molecules are essential for the identification of individual antigens in the approach as described in the present invention, which is based on the interaction of the specific antibodies and the corresponding H. pylori peptides or proteins. To gain access to relevant antibody repertoires, human sera were collected from
[0256] I. 54 randomly selected healthy adults. Individuals were interviewed for the presence or absence of clinical symptoms and previously diagnosed H. pylori infection.
[0257] II. patients with duodenal ulcer.
[0258] III. patients with gastric ulcer and cancer.
   For the patient groups H. pylori infection was confirmed and medical diagnosis was based on medical microbiological tests, Urease test, biopsy or gastroscopy. A total of 191 sera from patients were included in the analysis.

[0259] The sera were characterized for anti-H. pylori antibodies by a series of ELISA and immunoblotting assays.

[0260] For that purpose two different antigen preparation were used: whole cell extracts prepared from H. pylori strains KTH-Ca1 and KTH-Du and both IgG and IgA antibody levels were determined. Antibody titers were expressed as units calculated from absorbance readings at two different dilutions—10.000× and 50.000× for IgG and 1.000× and 5.000× for IgA—where the response was linear (FIGS. 1A and B). Among the high titer randomly taken individuals eigth out of the 54 included (15%) showed significant IgG and IgA antibody levels. Half of these individuals were known H. pylori ‘patients’ acutely or before, the other half had no medical history or any complains. Sera of these four individuals were pooled and prepared for antigen identification. Since H. pylori infections are common, antibodies are present as a consequence of natural immunization from previous encounters with Helicobacter even without consequent carriage. The value of the ELISA assay imployed were further proved by analyzing patients' sera with or without active disease. Comparing the antibody levels in urease test positive and urease test negative individuals, significantly higher antibody levels were measured in the Urease+group (FIG. 1B). According to literature data, the false negative cases (˜10%) are much more prevalent then the false positives in this test, suggesting that the ELIAS assays is likely to be even more powerful predicting active H. pylori infections. Sera were ranked based on the reactivity against total lysate preparation in both antibody classes, and the highest ones from all three serum donor groups were selected for further analysis by immunoblotting. This latter assay confirmed immune reactivity against multiple H. pylori proteins, as it is examplified on FIG. 1C.

[0261] This extensive antibody characterization approach has led to the unambiguous identification of anti-Helicobacter hyperimmune sera and allowed the preparation of 5 donor pools.

### Example 2

### Generation of Highly Random, Frame-Selected, Small-Fragment, Genomic DNA Libraries of Helicobacter pylori

Experimental Procedures

[0262] Preparation of helicobacter genomic DNA. Sufficient amounts of bacterial pellets from the KTH-Ca1 and KTH-Du clinical isolates of H. pylori were obtained from Dr. Lars Engstrand. Bacterial pellets were washed 3× with PBS and carefully re-suspended in 0.5 ml of Lysozyme solution (100 mg/ml). 0.1 ml of 10 mg/ml heat treated RNase A and 20 U of RNase T1 were added, mixed carefully and the solution was incubated for 1 h at 37° C. Following the addition of 0.2 ml of 20% SDS solution and 0.1 ml of Proteinase K (10 mg/ml) the tube was incubated overnight at 55° C. 1/3 volume of saturated NaCl was then added and the solution was incubated for 20 min at 4° C. The extract was pelleted in a microfuge (13,000 rpm) and the supernatant transferred into a new tube. The solution was extracted with PhOH/CHCl₃/IAA (25:24:1) and with CHCl₃/IAA (24:1). DNA was precipitated at room temperature by adding 0.6× volume of Isopropanol, spooled from the solution with a sterile Pasteur pipette and transferred into tubes containing 80% ice-cold ethanol. DNA was recovered by centrifuging the precipitates with 10-12,000×g, then dried on air and dissolved in ddH₂O.

[0263] Preparation of small genomic DNA fragments. Genomic DNA was mechanically sheared into fragments ranging in size between 150 and 300 bp using a cup-horn sonicator (Bandelin Sonoplus UV 2200 sonicator equipped with a BB5 cup horn, 10 sec. pulses at 100% power output) or into fragments of size between 50 and 70 bp by mild DNase I treatment (Novagen). It was observed that sonication yielded a much tighter fragment size distribution when breaking the DNA into fragments of the 150-300 bp size range. However, despite extensive exposure of the DNA to ultrasonic wave-induced hydromechanical shearing force, subsequent decrease in fragment size could not be efficiently and reproducibly achieved. Therefore, fragments of 50 to 70 bp in size were obtained by mild DNase I treatment using Novagen's shotgun cleavage kit. A 1:20 dilution of DNase I provided with the kit was prepared and the digestion was performed in the presence of MnCl₂ in a 60 μl volume at 20° C. for 5 min to ensure double-stranded cleavage by the enzyme. Reactions were stopped with 2 μl of 0.5 M EDTA and the fragmentation efficiency was evaluated on a 2% TAE-agarose gel. This treatment resulted in total fragmentation of genomic DNA into near 50-70 bp fragments. Fragments were then blunt-ended twice using T4 DNA Polymerase in the presence of 100 μM each of dNTPs to ensure efficient flushing of the ends. Fragments were used immediately in ligation reactions or frozen at −20° C. for subsequent use.

[0264] Description of the vectors. The vector pMAL4.31 was constructed on a pASK-IBA backbone {Skerra, k, 1994} with the beta-lactamase (bla) gene exchanged with the Kanamycin resistance gene. In addition, the bla gene was cloned into the multiple cloning site. The sequence encoding mature beta-lactamase is preceded by the leader peptide sequence of ompA to allow efficient secretion across the cytoplasmic membrane. Furthermore a sequence encoding the first 12 amino acids (spacer sequence) of mature beta-lactamase follows the ompA leader peptide sequence to avoid fusion of sequences immediately after the leader peptidase cleavage site, since e.g. clusters of positive charged amino acids in this region would decrease or abolish translocation across the cytoplasmic membrane {Kajava, A. et al., 2000}. A SmaI restriction site serves for library insertion. An upstream FseI site and a downstream NotI site, which were used for recovery of the selected fragment, flank the SmaI site. The three restriction sites are inserted after the sequence encoding the 12 amino acid spacer sequence in such a way that the bla gene is transcribed in the −1 reading frame resulting in a stop codon 15 bp after the NotI site. A +1 bp insertion restores the bla ORF so that beta-lactamase protein is produced with a consequent gain of Ampicillin resistance.

[0265] The vector pMAL9.1 was constructed by cloning the lamB gene into the multiple cloning site of pEH1 {Hashemzadeh-Bonehi, L. et al., 1998}. Subsequently, a sequence was inserted in lamB after amino acid 154, containing the restriction sites FseI, SmaI and NotI. The reading frame for this insertion was constructed in such a way that transfer of frame-selected DNA fragments excised by digestion with FseI and NotI from plasmid pMAL4.31 yields a continuous reading frame of lamB and the respective insert.

[0266] The vector pHIE11 was constructed by cloning the fhuA gene into the multiple cloning site of pEH1. Thereafter, a sequence was inserted in fhuA after amino acid 405, containing the restriction site FseI, XbaI and NotI. The reading frame for this insertion was chosen in a way that transfer of frame-selected DNA fragments excised by digestion with FseI and NotI from plasmid pMAL4.31 yields a continuous reading frame of fhuA and the respective insert.

[0267] Cloning and evaluation of the library for frame selection. Genomic fragments of H. pylori DNA were ligated into the SmaI site of the vector pMAL4.31. Recombinant DNA was electroporated into DH10B electrocompetent E. coli cells (GIBCO BRL) and transformants plated on LB-agar supplemented with Kanamycin (50 μg/ml) and Ampicillin (50 μg/ml). Plates were incubated over night at 37° C. and colonies collected for large scale DNA extraction. A representative plate was stored and saved for collecting colonies for colony PCR analysis and large-scale sequencing. A simple colony PCR assay was used to initially determine the rough fragment size distribution as well as insertion efficiency. From sequencing data the precise fragment size was evaluated, junction intactness at the insertion site as well as the frame selection accuracy (3n+1 rule).

[0268] Cloning and evaluation of the library for bacterial surface display. Genomic DNA fragments were excised from the pMAL4.31 vector, containing the H. pylori libraries with the restriction enzymes FseI and NotI. The entire population of fragments was then transferred into plasmids pMAL9.1 (LamB) or pHIE11 (FhuA), which have been digested with FseI and NotI. Using these two restriction enzymes, which recognise an 8 bp GC rich sequence, the reading frame that was selected in the pMAL4.31 vector is maintained in each of the platform vectors. The plasmid library was then transformed into E. coli DH5alpha cells by electroporation. Cells were plated onto large LB-agar plates supplemented with 50 μg/ml Kanamycin and grown over night at 37° C. at a density yielding clearly visible single colonies. Cells were then scraped off the surface of these plates, washed with fresh LB medium and stored in aliquots for library screening at −80° C.

Results

[0269] Libraries for frame selection. Four libraries (LHP1-50, LHP2-50, LHP1-300 and LHP2-300) were generated in the pMAL4.31 vector with sizes of approximately 50 and 300 bp, respectively. For each library, ligation and subsequent transformation of approximately 1 μg of pMAL4.31 plasmid DNA and 50 ng of fragmented genomic H. pylori DNA yielded 4×10⁵ to 2×10⁶ clones after frame selection. To assess the randomness of the libraries, approximately 600 randomly chosen clones of LHP1-50 and LHP2-50 were sequenced. The bioinformatic analysis showed that of these clones only very few were present more than once. Furthermore, it was shown for example for LHP2-50 that 90% of the clones fell in the size range between 19 and 64 bp with an average size of 28 bp (FIG. 2, 3). All sequences followed the “3n+1 rule”, showing that all clones were properly frame selected.

[0270] Bacterial surface display libraries. The display of peptides on the surface of E. coli required the transfer of the inserts from the LHP libraries from the frame selection vector pMAL4.31 to the display plasmids pMAL9.1 (LamB) or pHIE11 (FhuA). Genomic DNA fragments were excised by FseI and NotI restriction and ligation of 5 ng inserts with 0.1 μg plasmid DNA and subsequent transformation into DH5alpha cells resulted in 2-5×10⁶ clones. The clones were scraped off the LB plates and frozen without further amplification.

### Example 3

### Identification of Highly Immunogenic Peptide Sequences from H. pylori Using Bacterial Surface Displayed Genomic Libraries and Human Serum

Experimental Procedures

[0271] MACS screening. Approximately 2.5×10⁸ cells from a given library were grown in 5 ml LB-medium supplemented with 50 μg/ml Kanamycin for 2 h at 37° C. Expression was induced by the addition of 1 mM IPTG for 30 min. Cells were washed twice with fresh LB medium and approximately 2×10⁷ cells re-suspended in 100 μl LB medium and transferred to an Eppendorf tube.

[0272] 10 μg of biotinylated, human IgGs purified from serum was added to the cells and the suspension incubated over night at 4° C. with gentle shaking. 900 μl of LB medium was added, the suspension mixed and subsequently centrifuged for 10 min at 6,000 rpm at 4° C. (for IgA screens, 10 μg of purified IgAs were used and these captured with biotinylated anti-human-IgA secondary antibodies). Cells were washed once with 1 ml LB and then re-suspended in 100 μl LB medium. 10 μl of MACS microbeads coupled to streptavidin (Miltenyi Biotech, Germany) were added and the incubation continued for 20 min at 4° C. Thereafter 900 μl of LB medium was added and the MACS microbead cell suspension was loaded onto the equilibrated MS column (Miltenyi Biotech, Germany) which was fixed to the magnet. (The MS columns were equilibrated by washing once with 1 ml 70% EtOH and twice with 2 ml LB medium.)

[0273] The column was then washed three times with 3 ml LB medium. After removal of the magnet, cells were eluted by washing with 2 ml LB medium. After washing the column with 3 ml LB medium, the 2 ml eluate was loaded a second time on the same column and the washing and elution process repeated. The loading, washing and elution process was performed a third time, resulting in a final eluate of 2 ml.

[0274] A second round of screening was performed as follows. The cells from the final eluate were collected by centrifugation and re-suspended in 1 ml LB medium supplemented with 50 μg/ml Kanamycin. The culture was incubated at 37° C. for 90 min and then induced with 1 mM IPTG for 30 min. Cells were subsequently collected, washed once with 1 ml LB medium and suspended in 10 μl LB medium. Since the volume was reduced, 10 μg of human, biotinylated IgGs was added and the suspension incubated over night at 4° C. with gentle shaking. All further steps were exactly the same as in the first selection round. Cells selected after two rounds of selection were plated onto LB-agar plates supplemented with 50 μg/ml Kanamycin and grown over night at 37° C.

[0275] Evaluation of selected clones by sequencing and Western blot analysis. Selected clones were grown over night at 37° C. in 3 ml LB medium supplemented with 50 μg/ml Kanamycin to prepare plasmid DNA using standard procedures. Sequencing was performed at MWG (Germany).

[0276] For Western blot analysis approximately 10 to 20 μg of total cellular protein was separated by 10% SDS-PAGE and blotted onto HybondC membrane (Amersham Pharmacia Biotech, England). The LamB or FhuA fusion proteins were detected using human serum as the primary antibody at a dilution of approximately 1:5,000 and anti-human IgG or IgA antibodies coupled to HRP at a dilution of 1:5,000 as secondary antibodies. Detection was performed using the ECL detection kit (Amersham Pharmacia Biotech, England). Alternatively, rabbit anti FhuA or mouse anti LamB antibodies were used as primary antibodies in combination with the respective secondary antibodies coupled to HRP for the detection of the fusion proteins.

Results

[0277] Screening of bacterial surface display libraries by magnetic activated cell sorting (MACS) using biotinylated Igs. The libraries LHP1-50 and LHP2-50 in pMAL9.1 and LHP1-300 and LHP2-300 in pHIE11 were screened with pools of biotinylated, human IgGs and IgAs from patient sera or sera from healthy individuals (see Example 1: Preparation of antibodies from human serum). The selection procedure was performed as described under Experimental procedures. FIG. 4A shows a representative example of a screen with the LHP1-50 library and P6-IgGs. As can be seen from the colony count after the first selection cycle from MACS screening, the total number of cells recovered at the end is reduced from app. 1 to 2×10⁷ cells to approximately 10⁴ cells, whereby the selection in the presence of serum yielded a slightly higher number of cells than in the absence of antibodies (FIG. 4A). After the second round of screening however, a similar number of cells was recovered with P6-IgG, while only a few hundred cells were recovered when no IgGs from human serum were added, clearly showing that selection was dependent on H. pylori specific antibodies. To evaluate the performance of the screen, approximately 50 selected clones were picked randomly and subjected to Western blot analysis with the same, pooled serum (FIG. 4B). This analysis revealed that 70% of the selected clones showed reactivity with antibodies present in the relevant serum whereas the control strain expressing LamB without a H. pylori specific insert did not react with the same serum. In general, the rate of reactivity was observed to lie within the range of 35 to 75%. Colony PCR analysis confirmed that all selected clones contained an insert in the expected size range.

[0278] Subsequent sequencing of a larger number of randomly picked clones (600 to 1200 per screen) led to the identification of the gene and the corresponding peptide or protein sequence that was specifically recognized by the human serum used for screening. The frequency with which a specific clone is selected reflects at least in part the abundance and/or affinity of the specific antibodies in the serum used for selection and recognizing the epitope presented by this done. In that regard it is striking that clones derived from some ORFs (e.g. HP0527, HP0547 and HP1341) were picked more than 100 times, indicating their highly immunogenic property. Table 1 summarizes the data obtained for all 13 performed screens. All clones in Table 1 have been verified by Western blot analysis with whole cellular extracts from single clones to show the indicated reactivity with the pool of human serum used in the respective screen. As seen in Table 1, distinct regions of the identified ORF are identified as immunogenic, since variably sized fragments of the proteins are displayed on the surface by the platform proteins.

[0279] It is further worth noticing that most of the genes identified by the bacterial surface display screen encode proteins that are either attached to the surface of H. pylori and/or are secreted. This is in accordance with the expected role of surface attached or secreted proteins in virulence of H. pylori.

### Example 4

### Gene Distribution Studies with Highly Immunogenic Proteins Identified from H. pylori

Experimental Procedures

[0280] Gene distribution of H. pylori antigens by PCR. In order to establish whether the genes encoding the identified Helicobacter pylori antigens occur ubiquitously in H. pylori strains, PCR was performed on a series of independent H. pylori isolates with primers specific for the gene of interest. H. pylori isolates were obtained from patients covering various disease conditions associated with H. pylori infection (cancer patients: 11 strains, duodenal ulcer: 6, atrophic gastritis: 5, gastritis: 3, Hiatus hernia: 1, normal controls: 2). Oligonucleotide sequences as primers were designed for all identified ORFs yielding products of approximately 1,000 bp, if possible covering all identified immunogenic epitopes. Genomic DNA of all H. pylori strains was prepared as described under Example 2. PCR was performed in a reaction volume of 25 μl using Taq polymerase (1U), 200 nM dNTPs, 10 pMol of each oligonucleotide and the kit according to the manufacturers instructions (Invitrogen, The Netherlands). As standard, 30 cycles (1×: 5 min. 95° C., 30×: 30 sec. 95° C., 30 sec. 56° C., 30 sec. 72° C., 1×4 min. 72° C.) were performed, unless conditions had to be adapted for individual primer pairs.

Results

[0281] Identified genes encoding immunogenic proteins were tested by PCR for their presence in 28 different strains of H. pylori (Table 2). An ideal vaccine antigen would be an antigen that is present in all, or the vast majority of strains of the target organism to which the vaccine is directed. For a large number of antigens, the PCR reaction amplified a DNA fragment of the correct size with all 28 chosen H. pylori strains (e.g. HP0563, HP0887, HP1341). The sequencing of one PCR fragment from one individual strain showed that the amplified DNA fragment corresponds to the correct gene, but it also allows an estimation of the level of variation within this particular gene. While some genes possess a completely identical amino acid sequence in the two compared strains (e.g. HP0121, HP0413, HP1374), most antigens showed some degree of variation as listed in Table 2. The sequencing revealed that the amino acid sequences of approximately 80% of all antigens were to more than 95% identical in the two analysed strains, with only 1 strain showing a level of identity below 85%.

[0282] From a total of 106 genes analysed, 76 were present in all strains tested, 14 were present in more than 80% of the strains, while only 16 genes were absent in more than 20% of the tested 28 strains (Table 2). In addition, only 9 genes (e.g. HP115, HP717, HP887, HP913 and HP1119) showed a clear variation in size but were present in all or most H. pylori isolates. Importantly, many of the identified antigens are well conserved in all strains in sequence and size and are therefore novel vaccine candidates to prevent infections by H. pylori.

### Example 5

### Assessment of the Reactivity of Highly Immunogenic Peptide Sequences from H. pylori with Individual Human Sera

Experimental Procedures

Peptide Synthesis

[0283] Peptides were synthesized in small scale (4 mg resin; up to 288 in parallel) using standard F-moc chemistry on a Rink amide resin (PepChem, Tübingen, Germany) using a SyroII synthesizer (Multisyntech, Witten, Germany). After the sequence was assembled, peptides were elongated with Fmoc-epsilon-aminohexanoic acid (as a linker) and biotin (Sigma, St. Louis, Mo.; activated like a normal amino acid). Peptides were cleaved off the resin with 93% TFA, 5% triethylsilane, and 2% water for one hour. Peptides were dried under vacuum and freeze dried three times from acetonitrile/water (1:1). The presence of the correct mass was verified by mass spectrometry on a Reflex III MALDI-TOF (Bruker, Bremen Germany). The peptides were used without further purification.

Enzyme Linked Immune Assay (ELISA).

[0284] Biotin-labeled peptides (at the N-terminus) were coated on Streptavidin ELISA plates (EXICON) at 10 μg/ml concentration according to the manufacturer's instructions. Highly specific Horse Radish Peroxidase (HRP)-conjugated anti-human IgG secondary antibodies (Southern Biotech) were used according to the manufacturers' recommendations (dilution: 1,000×). Sera were tested at two serum dilutions, 200× and 1,000×. Following manual coating, peptide plates were processed and analyzed by the Gemini 160 ELISA robot (TECAN) with a built-in ELISA reader (GENIOS, TECAN).

Results

[0285] Following the bioinformatic analysis of selected clones, corresponding peptides were designed and synthesized. In case of epitopes with more than 26 amino acid residues, overlapping peptides were made. All peptides were synthesized with a N-terminal biotin-tag and used as coating reagents on Streptavidin-coated ELISA plates.

[0286] The analysis was performed with 144 peptides and 22 individual human serum samples which were included in the serum pools used for preparations of IgG and IgA screening reagents for bacterial surface display. A summary for serum reactivity of peptides representing H. pylori epitopes from the genomic screen analysed with human sera is shown in Table 3. The peptides were compared by the score calculated for each peptide based on the number of positive sera and the extent of reactivity. Peptides range from highly and widely reactive to weakly positive ones. Among the most reactive ones there are known antigens, some of them are also protective in animal challenge models, such as the CagA (HP0547) and vacuolating cytotoxin (HP0887). Besides the known antigens several novel highly immunogenic proteins and epitopes within those have been identified, such as the siderophore-mediated iron transport protein (HP1341), fumarate reductase flavoprotein subunit (frdA) (HP0192) and HP0087 hypothetical protein among others.

### REFERENCES

[0287] Altschul, S., et al. (1990). Journal of Molecular Biology 215: 403-10.
[0288] Bennett, D., et al. (1995). J Mol Recognit 8: 52-8.
[0289] Bjorkholm, B., et al. (2003). J Intern Med 253: 102-19.
[0290] Blaser, M. (2000). Nat Med 6: 376-7.
[0291] Censini, S., et al. (1996). Proc Natl Acad Sci USA 93:14648-53.
[0292] Clackson, T., et al. (1991). Nature 352: 624-8.
[0293] Devereux, J., et al. (1984). Nucleic acids research 12: 387-95.
[0294] Doherty, E., et al. (2001). Annu Rev Biophys Biomol Struct 30: 457-475.
[0295] Dubreuil, J., et al. (2002). Microbiol Mol Biol Rev 66: 617-29.
[0296] Eisenbraun, M., et al. (1993). DNA Cell Biol 12:791-7.
[0297] Etz, H., et al. (2001). J Bacteriol 183: 6924-35.
[0298] Ferrero, R., et al. (2001). Scand J Immunol 53:443-8.
[0299] Fujikawa, A., et al. (2003). Nat Genet 33: 375-81.
[0300] Ganz, T. (1999). Science 286:420-421.
[0301] Georgiou, G. (1997). Nature Biotechnology 15: 29-34.
[0302] Hancock, R. E., et al. (1999). Drugs 57: 469-473
[0303] Hashemzadeh-Bonehi, L., et al. (1998). Mol Microbiol 30: 676-678.
[0304] Heinje, von G (1987) e.g Sequence Analysis in Molecular Biology, Academic Press
[0305] Hemmer, B., et al. (1999). Nat Med 5: 1375-82.
[0306] Johanson, K., et al. (1995). J Biol Chem 270: 9459-71.
[0307] John Wiley & Sons (1987) Current Protocols in Molecular Biology
[0308] Jones, P., et al. (1986). Nature 321:522-5.
[0309] Kajava, A., et al. (2000). J Bacteriol 182: 2163-9.
[0310] Kersulyte, D., et al. (2000). J Bacteriol 182: 3210-8.
[0311] Kohler, G., et al. (1975). Nature 256: 495-7.
[0312] Kolaskar, A., et al. (1990). FEBS Lett 276:172-4.
[0313] Lewin, A., et al. (2001). Trends Mol Med 7:221-8.
[0314] Loughlin, M., et al. (2003). Infect Immun 71: 2022-31.
[0315] Marks, J., et al. (1992). Biotechnology (NY) 10: 779-83.
[0316] McCafferty, J., et al. (1990). Nature 348: 552-4.
[0317] Okano, H., et al. (1991). J Neurochem 56:560-7.
[0318] Oliaro, J., et al. (2000). J Med Microbiol 49: 643-50.
[0319] Oligodeoxynucleotides as Antisense Inhibitors of Gene Expression; CRC Press, Boca Ration, Fla. (1988) for a description of these molecules.
[0320] Prinz, C., et al. (2003). Trends Microbiol 11: 134-8.
[0321] Rammensee, H., et al. (1999). Immunogenetics 50: 213-9.
[0322] Rosenshine, I., et al. (1992). Infect Immun 60: 2211-7.
[0323] Sabarth, N., et al. (2002). Infect Immun 70: 6499-5303.
[0324] Seeger, C., et al. (1984). Proc Natl Acad Sci USA 81: 5849-52.
[0325] Shibuya, A., et al. (2000) Nature Immunology 1: 441-446
[0326] Skerra, A. (1994). Gene 151: 131-5.
[0327] Sutton, P. (2001). Vaccine 19: 2286-90.
[0328] Svennerholm, A. (2003). Vaccine 21:347-53.
[0329] Tang, D., et al. (1992). Nature 356: 152-4.
[0330] Tempest, P., et al. (1991). Biotechnology (NY) 9: 266-71.

[0331] Tourdot, S., et al. (2000). Eur J Immunol 30: 3411-21.

TABLE 1
Immunogenic proteins identified by bacterial surface display.
A, 300 bp library of H. pylori KTH Ca1 in fhuA with IC7-IgG (757), B, 300 bp library of H. pylori KTH Ca1 in fhuA
with P5-IgG (729), C, 300 bp library of H. pylori KTH Ca1 in fhuA with P9-IgG (441), D, 50 bp library of H. pylori
KTH Ca1 in lamB with IC7-IgG (448), E, 50 bp library of H. pylori KTH Ca1 in lamB with P5-IgA (1130), F, 50 bp
library of H. pylori KTH Ca1 in lamB with P5-IgG (911), G, 50 bp library of H. pylori KTH Ca1 in lamB with P6-
IgA (1135), H, 50 bp library of H. pylori KTH Ca1 in lamB with P6-IgG (844), I, 50 bp library of H. pylori KTH Ca1
in lamB with P9-IgG (1121), J, 300 bp library of H. pylori KTH Du in fhuA with P6-IgG (433), K, 300 bp library of
H. pylori KTH Du in fhuA with P8-IgG (550), L, 50 bp library of H. pylori KTH Du in lamB with P6-IgG (1077),
M, 50 bp library of H. pylori KTH Du in lamB with P8-IgG (740); *, prediction of antigenic sequences longer than 5
amino acids was performed with the program ANTIGENIC (Kolaskar and Tongaonkar, 1990).

| | | | No. of | Location | |
|---|---|---|---|---|---|
| | | | selected | of identified | |
| H. pylori | | | clones per | im- | Seq. |
| antigenic | Putative function | | ORF and | munogenic | ID (DNA, |
| protein | (by homology) | predicted immunogenic aa** | screen | region (aa) | Prot.) |
| HP0009 | outer membrane | 63-91, 95-101, 110-116, 134-148, 150-156, 158-164, | G: 1, H: 2, | 239-308 | 1, 179 |
| | protein (omp1) | 188-193, 197-209, 226-241, 247-254, 291-297, 312-319, | K: 2, M: 38 | | |
| | | 338-346, 351-358, 366-378, 404-410, 420-438, 448-454, | | | |
| | | 465-473, 482-488, 490-498, 503-510, 512-519, 531-543, | | | |
| | | 547-554, 568-575, 589-604, 610-631 | | | |
| HP0010 | chaperone and heat | 16-29, 35-47, 50-68, 70-79, 91-101, 143-149, 158-163, | K: 1 | 17-79, | 2, 180 |
| | shock protein | 185-191, 196-206, 215-224, 230-237, 244-251, 258-278, | | 218-233 | |
| | (groEL) | 290-311, 319-325, 338-351, 365-385, 396-429, 445-454, | | | |
| | | 458-466, 491-499, 501-521 | | | |
| HP0043 | mannose-6- | 4-10, 16-41, 46-66, 77-84, 91-97, 102-118, 125-144, 187-200, | G: 1 | 460-470 | 3, 181 |
| | phosphate | 202-214, 245-253, 255-261, 286-295, 300-330, 335-342, | | | |
| | isomerase (pmi) | 350-361, 363-381, 385-392, 396-416, 435-450 | | | |
| HP0063 | hypothetical protein | 11-19, 27-48, 52-59, 77-82, 84-107, 118-125, 127-154, | D: 4, E: 1, | 313-331 | 4, 182 |
| | | 178-183, 192-209, 215-221, 286-295, 302-313, 350-357, | G: 2 | | |
| | | 402-415, 417-431, 453-463, 465-493 | | | |
| HP0067 | urease accessory | 19-26, 30-43, 47-55, 63-68, 72-80, 97-104, 107-119, 129-146, | H: 1 | 26-43 | 5, 183 |
| | protein (ureH) | 160-175, 194-216, 231-251, 254-260 | | | |
| HP0072 | urease beta subunit | 7-13, 29-37, 65-81, 110-120, 123-131, 135-152, 230-249, | E: 2, G: 3, | 533-567 | 6, 184 |
| | (urea | 254-260, 284-290, 292-299, 317-326, 329-336, 403-444, | H: 1, M: 2 | | |
| | amidohydrolase) | 452-458, 466-477, 490-498, 510-519, 541-550, 557-566 | | | |
| | (ureB) | | | | |
| HP0086 | Conserved | 5-47, 71-77, 79-86, 89-95, 120-126, 137-144, 176-181, | B: 3, C: 1, I: 4 | 59-75 | 7, 185 |
| | hypothetical protein | 184-196, 202-208, 211-232, 236-282, 301-313, 317-325, | | | |
| | | 341-347, 353-384, 394-400, 412-433, 436-443 | | | |
| HP0087 | hypothetical protein | 4-18, 22-38, 59-69, 106-112, 116-130, 138-149, 156-170, | A: 2, B: 2, | 1-104, | 8, 186 |
| | | 175-197, 200-214, 216-223, 233-244, 255-261, 266-276, | E: 2, F: 1, | 130-147 | |
| | | 279-286, 325-333, 342-348, 366-399, 402-420, 429-441 | G: 2, I: 1, L: 2 | | |
| HP0088 | RNA polymerase | 50-58, 69-95, 97-113, 131-136, 157-163, 170-175, 188-212, | A: 2, B: 9, | 35-46 | 9, 187 |
| | sigma-70 factor | 220-226, 254-259, 265-277, 283-289, 297-308, 311-318, | D: 2, F: 3, | | |
| | (rpoD) | 347-358, 360-369, 378-401, 416-421, 440-450, 454-462, | H: 4 | | |
| | | 470-476, 493-502, 506-514, 536-567, 585-590, 598-607, | | | |
| | | 613-618, 653-659 | | | |
| HP0089 | pfs protein (pfs) | 16-29, 32-60, 65-87, 89-123, 128-134, 137-158, 162-173, | E: 11, G: 2 | 206-225 | 10, 188 |
| | | 178-196, 210-216, 218-228 | | | |
| HP0115 | flagellin B (flaB) | 10-20, 26-35, 51-64, 86-91, 94-100, 113-122, 154-160, | F: 2, H: 1, | 24-55, | 11, 189 |
| | | 185-191, 193-201, 211-217, 225-230, 237-246, 251-257, | K: 1, L: 52 | 236-341 | |
| | | 298-304, 306-312, 316-328, 340-348, 357-389, 391-397, | | | |
| | | 415-421, 449-456, 458-471, 488-495, 502-511 | | | |
| HP0175 | cell binding factor 2 | 5-22, 41-51, 87-93, 114-122, 127-136, 150-156, 158-166, | A: 11, C: 7, | 9-126, | 12, 190 |
| | | 223-233, 245-263, 291-296 | K: 2 | 127-285 | |
| HP0121 | phosphoenolpyruvate | 30-43, 46-56, 61-70, 72-83, 85-93, 103-113, 119-125, | H: 3, I: 4, K: 3 | 347-361 | 13, 191 |
| | synthase (ppsA) | 151-166, 179-191, 212-218, 225-231, 236-243, 262-267, | | | |
| | | 291-307, 331-344, 349-355, 366-372, 380-386, 414-422, | | | |
| | | 428-447, 459-464, 469-478, 507-519, 525-544, 563-569, | | | |
| | | 576-590, 620-626, 633-643, 654-659, 665-671, 684-707, | | | |
| | | 717-723, 725-733, 747-779, 782-801 | | | |
| HP0123 | threonyl-tRNA | 4-12, 14-26, 37-80, 107-115, 133-139, 144-150, 154-165, | D: 6, F: 1, | 7-23, | 14, 192 |
| | synthetase (thrS) | 173-180, 191-199, 205-211, 221-231, 237-244, 254-284, | H: 2, M: 1 | 465-479 | |
| | | 307-340, 342-353, 360-368, 370-380, 479-493, 495-503, | | | |
| | | 509-522, 525-536, 539-547, 554-560, 565-573, 578-583 | | | |
| HP0130 | hypothetical protein | 4-17, 47-55, 76-83, 85-100, 104-112, 117-123, 126-135, | A: 1, C: 1, I: | 258-283 | 15, 193 |
| | | 142-148, 156-167, 174-182, 267-273 | 1, K: 1, M: 3 | | |
| HP0150 | hypothetical protein | 8-32, 36-42, 65-88, 102-108, 112-140, 147-163, 170-179, | A: 1, B: 1, | 117-124 | 16, 194 |
| | | 183-193 | D: 1, J: 1, L: 2 | | |
| HP0183 | serine | 12-18, 45-50, 62-77, 82-95, 99-113, 115-123, 125-147, | I: 5 | 333-350 | 17, 195 |
| | hydroxymethyltransferase | 155-177, 187-209, 211-223, 244-253, 259-270, 278-297, | | | |
| | (glyA) | 302-307, 311-318, 329-334, 350-356, 359-365, 390-400, | | | |
| | | 402-413 | | | |
| HP0192 | fumarate reductase, | 4-13, 15-27, 30-46, 53-58, 68-74, 82-95, 115-126, 134-139, | H: 1, I: 4, | 376-400 | 18, 196 |
| | flavoprotein subunit | 148-153, 159-176, 182-199, 201-217, 220-225, 227-235, | L: 20 | | |
| | (frdA) | 237-248, 253-266, 300-315, 322-336, 390-396, 412-426, | | | |
| | | 438-445, 448-459, 477-484, 502-508, 515-527, 529-537, | | | |
| | | 553-568, 643-651, 658-667, 690-703 | | | |
| HP0197 | S- | 4-10, 24-32, 38-55, 59-67, 70-77, 80-87, 89-97, 123-129, | F: 1, H: 1, | 73-94 | 19, 197 |
| | adenosylmethionine | 134-151, 166-172, 178-189, 191-216, 218-235, 245-259, | L: 8 | | |
| | synthetase 2 (metX) | 271-315, 326-339, 341-360 | | | |
| HP0201 | fatty | 13-25, 31-38, 43-57, 79-85, 92-99, 106-112, 117-128, | L: 5 | 240-256 | 20, 198 |
| | acid/phospholipid | 130-139, 146-158, 160-175, 194-204, 211-222, 225-232, | | | |
| | synthesis protein | 234-242, 263-270, 278-292, 299-320, 322-333 | | | |
| | (plsX) | | | | |
| HP0202 | beta-ketoacyl-acyl | 4-17, 55-63, 66-101, 109-131, 135-143, 145-151, 155-161, | F: 1, I: 3 | 195-221 | 21, 199 |
| | carrier protein | 164-170, 177-185, 192-198, 213-218, 223-238, 246-256, | | | |
| | synthase III | 258-268, 273-283, 309-314, 322-328 | | | |
| HP0210 | chaperone and heat | 13-24, 31-39, 41-50, 63-69, 90-96, 104-109, 116-141, | F: 1, M: 2 | 344-363 | 22, 200 |
| | shock protein C62.5 | 148-153, 161-167, 173-178, 190-209, 253-258, 265-272, | | | |
| | (htpG) | 279-289, 295-312, 317-343, 355-366, 376-389, 400-407, | | | |
| | | 430-451, 453-464, 466-472, 487-493, 499-505, 523-538, | | | |
| | | 554-559, 568-579, 584-601 | | | |
| HP0211 | conserved | 5-22, 30-36, 53-59, 61-70, 82-92, 99-106, 120-131, 135-148, | A: 1, C: 1, | 111-249 | 23, 201 |
| | hypothetical | 154-167, 169-183, 187-199, 204-212, 231-247 | K: 1 | | |
| | secreted protein | | | | |
| HP0228 | conserved | 17-36, 40-66, 71-144, 148-171, 173-191, 199-214, 220-255, | A: 1, E: 6, | 287-307 | 24, 202 |
| | hypothetical | 265-272, 278-288, 298-333, 342-385 | F: 1 | | |
| | integral membrane | | | | |
| | protein | | | | |
| HP0229 | outer membrane | 4-16, 22-28, 30-36, 42-48, 95-116, 154-162, 164-174, | E: 1, F: 1, L: | 33-44, | 25, 203 |
| | protein (omp6) | 239-252, 258-263, 273-285, 306-313, 323-333, 341-357, | 14 | 233-258, | |
| | | 363-369, 372-379, 395-401, 430-436, 438-453, 464-480 | | 349-369 | |
| HP0235 | conserved | 4-21, 30-37, 46-53, 59-68, 80-92, 98-104, 118-143, 150-160, | B: 5 | 191-350 | 26, 204 |
| | hypothetical | 165-185, 187-200, 204-211, 224-236, 241-246, 252-258, | | | |
| | secreted protein | 271-280, 288-294, 311-320, 335-341 | | | |
| HP0239 | glutamyl-tRNA | 4-16, 37-59, 64-70, 79-87, 93-102, 107-127, 143-165, | H: 2 | 235-250 | 27, 205 |
| | reductase (hemA) | 172-188, 197-204, 207-218, 221-227, 242-248, 258-277, | | | |
| | | 289-296, 298-316, 332-338, 344-365, 367-373, 375-382, | | | |
| | | 400-408, 415-425, 438-446 | | | |
| HP0258 | conserved | 4-37, 39-66, 84-98, 101-127, 140-149, 157-163, 166-172, | H: 1, L: 1 | 183-204 | 28, 206 |
| | hypothetical | 175-182, 184-193, 203-208, 215-232, 234-247, 250-299, | | | |
| | integral membrane | 303-345 | | | |
| | protein | | | | |
| HP0266 | dihydroorotase | 10-20, 41-61, 73-87, 112-141, 176-192, 194-201, 205-222, | M: 21 | 304-328 | 29, 207 |
| | (pyrC) | 230-237, 257-264, 276-282, 284-310, 312-318 330-337, | | | |
| | | 349-357 | | | |
| HP0279 | lipopolysaccharide | 4-31, 42-103, 105-113, 121-153, 160-181, 188-196, 210-226, | G: 1, L: 6 | 304-318 | 30, 208 |
| | heptosyltransferase- | 231-264, 272-287, 297-304, 328-336 | | | |
| | 1 (rfaC) | | | | |
| HP0289 | toxin-like outer | 21-43, 46-52, 54-70, 72-79, 94-107, 133-141, 160-166, | B: 1, E: 2, | 511-523, | 31, 209 |
| | membrane protein | 217-253, 311-317, 359-365, 374-381, 390-395, 434-440, | H: 2, I: 3, L: 7 | 612-630, | |
| | | 488-494, 497-502, 511-522, 554-563, 565-574, 577-585, | | 1790-1803 | |
| | | 591-598, 601-606, 617-625, 633-643, 658-664, 676-682, | | | |
| | | 694-702, 710-719, 754-760, 782-788, 802-808, 916-921, | | | |
| | | 942-948, 955-964, 973-979, 992-998, 1006-1011, | | | |
| | | 1016-1023, 1030-1038, 1046-1053, 1059-1066, | | | |
| | | 1088-1098, 1119-1126, 1129-1135, 1156-1171, | | | |
| | | 1173-1181, 1202-1210, 1255-1261, 1268-1280, | | | |
| | | 1295-1310, 1312-1320, 1375-1381, 1406-1417, | | | |
| | | 1450-1471, 1478-1492, 1498-1506, 1569-1578, | | | |
| | | 1603-1608, 1611-1624, 1648-1655, 1663-1670, | | | |
| | | 1680-1698, 1702-1707, 1713-1719, 1737-1742, | | | |
| | | 1747-1753, 1762-1769, 1771-1785, 1790-1804, | | | |
| | | 1811-1818, 1830-1836, 1838-1852, 1874-1886, | | | |
| | | 1893-1899, 1902-1909, 1942-1948, 1952-1962, | | | |
| | | 1980-1986, 2001-2017, 2020-2028, 2042-2050, | | | |
| | | 2052-2068, 2074-2079, 2083-2095, 2107-2113, | | | |
| | | 2147-2155, 2177-2194, 2203-2211, 2236-2241, | | | |
| | | 2251-2258, 2267-2274, 2285-2292, 2314-2328, | | | |
| | | 2330-2340, 2358-2365, 2390-2401, 2408-2418, | | | |
| | | 2432-2453, 2463-2476, 2486-2507, 2528-2537, | | | |
| | | 2540-2548, 2552-2558, 2568-2576, 2596-2601, | | | |
| | | 2610-2622, 2629-2638, 2653-2669, 2718-2727, | | | |
| | | 2749-2767, 2777-2784, 2789-2795, 2806-2815, | | | |
| | | 2817-2824, 2835-2843, 2847-2854, 2860-2881 | | | |
| HP0292 | hypothetical protein | 4-54, 61-68, 72-82, 86-93, 100-108, 115-130, 147-154, | E: 14 | 96-109 | 32, 210 |
| | | 187-194, 196-207, 224-229, 236-251, 275-287 | | | |
| HP0295 | flagellin B homolog | 31-39, 62-69, 91-101, 158-172, 175-180, 186-193, 201-208, | A: 1, B: 2, | 366-503 | 33, 211 |
| | (fla) | 210-223, 243-250, 273-286, 293-299, 319-325, 343-354, | C: 3 | | |
| | | 356-365, 368-384, 414-435, 471-491, 512-518, 550-556, | | | |
| | | 567-581, 584-589, 633-639, 680-692, 697-708, 716-721, | | | |
| | | 747-754, 779-786, 810-816 | | | |
| HP0349 | CTP synthetase | 5-20, 22-48, 57-65, 96-101, 111-122, 130-145, 154-164, | M: 2 | 289-305 | 34, 212 |
| | (pyrG) | 170-181, 193-199, 201-216, 224-241, 244-262, 281-323, | | | |
| | | 342-351, 359-367, 369-396, 406-416, 424-433, 450-456, | | | |
| | | 485-491, 493-499, 501-515, 517-535 | | | |
| HP0351 | flagellar basal-body | 4-17, 22-44, 53-60, 66-83, 87-94, 101-106, 110-116, 131-137, | G: 9, I: 1 | 106-126 | 35, 213 |
| | M-ring protein (fliF) | 148-183, 189-207, 209-215, 233-242, 251-262, 264-272, | | | |
| | | 290-296, 308-327, 359-373, 375-380, 397-405, 415-420, | | | |
| | | 426-433, 444-475, 478-484, 529-536, 548-558 | | | |
| HP0380 | glutamate | 4-38, 42-50, 58-64, 72-81, 92-118, 140-146, 157-165, | H: 6, I: 1, L: 4 | 109-129, | 36, 214 |
| | dehydrogenase | 172-192, 198-204, 208-216, 227-234, 238-258, 271-278, | | 370-380 | |
| | (gdhA) | 288-293, 311-322, 327-346, 357-370, 375-383, 395-409, | | | |
| | | 411-417, 425-432, 436-445 | | | |
| HP0392 | histidine kinase | 23-30, 36-49, 52-64, 86-94, 97-104, 121-129, 257-272, | B: 1, F: 2 | 54-72 | 37, 215 |
| | (cheA) | 279-286, 288-294, 307-327, 334-340, 369-375, 377-386, | | | |
| | | 406-412, 418-423, 430-438, 441-447, 459-465, 469-476, | | | |
| | | 482-488, 510-546, 550-580, 584-622, 638-645, 653-659, | | | |
| | | 675-683, 692-705, 723-731, 752-761, 788-795 | | | |
| HP0401 | 3-phosphoshikimate | 11-33, 36-46, 88-104, 116-126, 134-170, 189-195, 199-217, | E: 1, M: 12 | 259-273 | 38, 216 |
| | 1- | 225-250, 255-261, 266-273, 280-291, 296-313, 334-341, | | | |
| | carboxyvinyltransferase | 343-349, 354-360, 362-369, 373-380, 387-401, 406-420 | | | |
| | (aroA) | | | | |
| HP0406 | hypothetical protein | 9-14, 28-44, 57-64, 72-79, 86-93, 104-111, 116-126, 142-150, | M: 2 | 61-86 | 39, 217 |
| | | 159-164 | | | |
| HP0409 | GMP synthase | 10-17, 26-33, 43-61, 69-95, 101-107, 109-125, 129-135, | B: 1, F: 1 | 60-74 | 40, 218 |
| | (guaA) | 137-144, 147-153, 158-169, 177-187, 209-219, 221-232, | | | |
| | | 235-247, 261-268, 271-282, 296-302, 306-347, 355-362, | | | |
| | | 364-379, 386-399, 409-418, 424-442, 451-460, 467-479, | | | |
| | | 490-498 | | | |
| HP0413 | transposase-like | 8-14, 20-31, 65-84, 94-99, 154-179, 193-207, 238-253 | E: 9, F: 1, G: 1 | 96-118 | 41, 219 |
| | protein, PS3IS | | | | |
| HP0459 | virB4 homolog | 4-24, 30-44, 47-62, 84-93, 108-116, 124-133, 136-141, | M: 6 | 167-189 | 42, 220 |
| | (virB4) | 201-209, 217-223, 228-235, 238-245, 247-270, 275-285, | | | |
| | | 290-314, 328-338, 342-349, 353-365, 375-383, 386-392, | | | |
| | | 394-402, 417-427, 443-459, 465-481, 492-514, 516-524, | | | |
| | | 550-566, 602-617, 630-639, 666-676, 687-693, 719-730, | | | |
| | | 747-753, 783-790, 799-816, 824-831, 837-842 | | | |
| HP0480 | GTP-binding | 6-15, 18-28, 58-66, 84-101, 106-129, 136-151, 154-165, | H: 1 | 362-375 | 43, 221 |
| | protein, fusA- | 182-203, 205-211, 214-220, 222-228, 233-240, 251-260, | | | |
| | homolog (yihK) | 270-277, 284-291, 306-315, 322-328, 363-369, 378-388, | | | |
| | | 392-405, 443-452, 495-501, 512-523, 574-583 | | | |
| HP0485 | catalase-like protein | 5-25, 27-34, 47-59, 64-70, 76-86, 145-158, 166-183, 189-202, | A: 1, B: 2, | 1-102 | 44, 222 |
| | | 217-231, 235-242, 260-270, 278-309 | C: 3, K: 2 | | |
| HP0508 | hypothetical protein | 4-19, 24-76, 78-83, 90-99, 102-109, 114-122, 137-147, | A: 1 | 226-325 | 45, 223 |
| | | 154-174, 177-188, 203-212, 217-223, 227-239 | | | |
| HP0519 | conserved | 7-37, 71-90, 94-109, 117-128, 141-153, 179-192, 199-206, | B: 2, H: 1 | 40-51 | 46, 224 |
| | hypothetical protein | 225-231, 237-243, 258-264 | | | |
| HP0525 | virB11 homolog | 13-19, 25-30, 46-59, 75-91, 101-107, 114-124, 129-135, | D: 5 | 282-300 | 47, 225 |
| | | 137-145, 160-167, 171-179, 187-194, 209-215, 217-222, | | | |
| | | 229-239, 243-249, 257-265, 269-275, 299-308, 310-327 | | | |
| HP0527 | cag pathogenicity | 86-100, 216-230, 342-369, 382-388, 424-430, 438-445, | A: 316, B: | 366-781, | 48, 226 |
| | island protein (cag7- | 452-458, 488-494, 501-518, 554-560, 568-574, 584-592, | 88, C: 61, F: | 782-1518, | |
| | cagY) | 603-609, 611-629, 639-645, 652-661, 669-699, 708-714, | 12, G: 1, H: | 1731-1747 | |
| | | 726-738, 747-753, 763-775, 785-791, 794-807, 815-824, | 1, L: 7, J: | | |
| | | 826-845, 854-860, 863-868, 870-883, 892-898, 901-906, | 274, K: 93, | | |
| | | 909-921, 930-937, 946-959, 968-974, 977-990, 998-1007, | L: 14, M: 12 | | |
| | | 1009-1027, 1037-1043, 1046-1051, 1053-1066, | | | |
| | | 1075-1081, 1084-1089, 1092-1103, 1113-1119, | | | |
| | | 1122-1135, 1143-1152, 1154-1172, 1182-1188, | | | |
| | | 1191-1196, 1200-1210, 1220-1226, 1229-1235, | | | |
| | | 1237-1249, 1259-1265, 1268-1281, 1289-1298, | | | |
| | | 1305-1318, 1328-1334, 1337-1343, 1345-1357, | | | |
| | | 1367-1373, 1390-1396, 1405-1411, 1418-1423, | | | |
| | | 1426-1435, 1445-1455, 1474-1483, 1493-1500, | | | |
| | | 1505-1512, 1517-1524, 1538-1544, 1568-1578, | | | |
| | | 1595-1601, 1674-1682, 1687-1720, 1728-1736, | | | |
| | | 1738-1744, 1754-1761, 1764-1774, 1798-1824, | | | |
| | | 1836-1842, 1886-1893, 1895-1903 | | | |
| HP0540 | cag pathogenicity | 4-17, 20-39, 46-55, 60-66, 102-110, 114-122, 125-131, | A: 2, B: 6, | 169-381 | 49, 227 |
| | island protein | 161-167, 172-178, 185-190, 195-202, 218-232, 236-252, | C: 2, I: 1 | | |
| | (cag19) | 264-291, 293-302, 309-315, 324-339 | | | |
| HP0541 | cag pathogenicity | 5-10, 13-40, 42-53, 69-75, 83-89, 120-135, 150-161, 174-190, | B: 2, G: 1 | 30-200 | 50, 228 |
| | island protein | 203-225, 229-247, 257-287, 318-348 | | | |
| | (cag20) | | | | |
| HP0542 | cag pathogenicity | 7-19, 43-53, 64-72, 124-139 | B: 2, L: 18, | 52-84, | 51, 229 |
| | island protein | | M: 2 | 120-131 | |
| | (cag21-cagG) | | | | |
| HP0544 | cag pathogenicity | 12-19, 39-48, 58-100, 117-123, 154-162, 164-187, 189-195, | H: 1 | 561-575 | 52, 230 |
| | island protein | 202-216, 218-235, 241-246, 262-278, 315-328, 333-347, | | | |
| | (cag23-cagE) | 354-366, 372-379, 391-405, 422-429, 431-442, 444-450, | | | |
| | | 458-466, 478-485, 494-501, 504-510, 520-535, 573-580, | | | |
| | | 589-598, 615-625, 666-676, 686-698, 722-729, 737-746, | | | |
| | | 756-767, 787-796, 805-816, 824-829, 833-848, 856-864, | | | |
| | | 866-876, 879-886, 898-904, 918-924, 927-934, 941-960, | | | |
| | | 967-978 | | | |
| HP0545 | cag pathogenicity | 11-29, 49-55, 70-77, 84-100, 102-112, 148-155, 160-177, | A: 1, B: 3, I: | 1-104 | 53, 231 |
| | island protein | 181-204 | 2, K: 1 | | |
| | (cag24) | | | | |
| HP547 | cag pathogenicity | 27-44, 64-71, 122-133, 151-156, 164-178, 214-220, 226-232, | A: 72, B: 65, | 110-357, | 54, 232 |
| | island protein | 235-244, 253-262, 282-288, 294-310, 317-325, 350-356, | C: 175, D: | 358-501, | |
| | (cag26-cagA) | 362-368, 376-383, 438-443, 449-454, 459-464, 492-498, | 74, F: 51, G: | 502-1161 | |
| | | 500-511, 529-535, 538-546, 567-573, 597-603, 660-665, | 7, H: 10, I: | | |
| | | 674-679, 724-734, 763-769, 773-784, 791-801, 807-815, | 108, J: 9, K: | | |
| | | 821-826, 840-848, 863-868, 897-902, 908-928, 932-953, | 23, L: 33, | | |
| | | 956-975, 980-987, 990-996, 1012-1018, 1042-1063, | M: 129 | | |
| | | 1095-1116, 1149-1157, 1160-1167 | | | |
| HP0563 | hypothetical protein | 4-21, 64-71, 73-84, 128-138, 144-162, 203-217, 240-263, | L: 134 | 330-345 | 55, 233 |
| | | 288-298, 300-308, 310-317, 325-351, 369-380, 391-411 | | | |
| HP0604 | uroporphyrinogen | 5-11, 25-31, 39-48, 51-79, 89-98, 100-122, 135-148, 166-201, | A: 2, B: 1, | 31-45 | 56, 234 |
| | decarboxylase | 203-227, 230-250, 254-260, 266-272, 274-282, 299-305, | F: 1, K: 2 | | |
| | (hemE) | 328-337 | | | |
| HP0607 | acriflavine | 12-23, 29-48, 51-60, 66-72, 75-81, 83-93, 103-115, 133-148, | F: 2, G: 1, I: | 915-940 | 57, 235 |
| | resistance protein | 168-174, 195-204, 222-229, 231-240, 242-251, 270-280, | 1, L: 2 | | |
| | (acrB) | 286-305, 322-344, 349-360, 364-370, 378-400, 421-441, | | | |
| | | 448-484, 486-493, 495-501, 504-534, 547-561, 567-590, | | | |
| | | 597-607, 621-635, 643-649, 658-685, 688-694, 702-711, | | | |
| | | 717-731, 737-742, 759-765, 767-772, 776-786, 803-809, | | | |
| | | 815-825, 854-908, 910-919, 923-930, 942-948, 961-975, | | | |
| | | 994-1014 | | | |
| HP0630 | modulator of drug | 4-9, 32-47, 51-61, 75-96, 139-191 | A: 1, F: 1, | 1-124 | 58, 236 |
| | activity (mda66) | | H: 2, I: 1 | | |
| HP0635 | hypothetical protein | 4-13, 17-38, 43-49, 55-76, 88-95, 110-121, 128-146, 151-157, | F: 2, H: 1 | 191-203 | 59, 237 |
| | | 162-214, 222-240, 243-249, 251-273, 275-281, 292-298, | | | |
| | | 300-309, 312-320, 322-331, 355-369, 376-408, 446-460, | | | |
| | | 471-482, 485-509 | | | |
| HP0655 | protective surface | 4-21, 72-82, 89-103, 106-115, 118-124, 140-146, 174-184, | G: 1, H: 2 | 33-51, | 60, 238 |
| | antigen D15 | 191-200, 204-213, 218-224, 261-266, 282-293, 299-309, | | 818-835 | |
| | | 311-340, 342-358, 362-372, 381-389, 391-402, 413-421, | | | |
| | | 438-447, 457-464, 470-478, 501-507, 545-560, 578-624, | | | |
| | | 631-641, 658-670, 680-689, 717-738, 753-759, 795-805, | | | |
| | | 816-822, 830-838, 842-848, 869-881, 892-898 | | | |
| HP0659 | hypothetical protein | 4-21, 79-85, 156-177, 183-188, 206-214, 243-249, 261-269, | A: 4, B: 1, | 37-97, | 61, 239 |
| | | 287-292, 315-322, 334-345, 360-366, 374-390, 402-411 | K: 2 | 260-399 | |
| HP0683 | UDP-N- | 4-9, 19-54, 58-78, 97-104, 111-120, 126-134, 137-145, | G: 8 | 240-249 | 62, 240 |
| | acetylglucosamine | 163-173, 178-188, 193-203, 211-224, 246-286, 288-324, | | | |
| | pyrophosphorylase | 337-346, 355-362, 374-390, 392-398, 409-417 | | | |
| | (glmU) | | | | |
| HP0687 | iron(II) transport | 5-12, 14-31, 35-41, 43-61, 82-92, 97-105, 134-145, 155-166, | F: 1, L: 3 | 144-154 | 63, 241 |
| | protein (feoB) | 184-203, 215-223, 225-251, 272-279, 281-306, 310-345, | | | |
| | | 358-418, 435-473, 482-490, 525-532, 538-547, 549-563, | | | |
| | | 578-604, 613-639 | | | |
| HP0696 | N- | 53-59, 64-72, 74-100, 133-152, 154-172, 176-181, 207-214, | A: 5, B: 6, | 544-685 | 64, 242 |
| | methylhydantoinase | 225-238, 275-297, 304-310, 331-340, 362-367, 384-395, | C: 13, E: 2, | | |
| | | 403-410, 437-443, 448-456, 482-490, 579-597, 602-610, | F: 1, G: 1, L: 1 | | |
| | | 625-630, 633-651, 699-707, 709-715, 734-743, 750-762 | | | |
| HP0701 | DNA gyrase, sub A | 12-18, 22-40, 45-83, 89-97, 103-109, 147-153, 159-173, | G: 2, H: 2, I: | 202-218, | 65, 243 |
| | (gyrA) | 195-204, 210-219, 243-253, 259-265, 273-282, 303-309, | 3, L: 1 | 282-299, | |
| | | 315-325, 332-340, 346-358, 362-367, 377-390, 393-402, | | 339-350, | |
| | | 418-426, 447-455, 467-480, 505-512, 514-525, 548-561, | | 617-628 | |
| | | 566-576, 584-596, 619-626, 638-645, 649-659, 661-680, | | | |
| | | 699-708, 714-720, 753-759, 766-772, 775-781, 801-808 | | | |
| HP0706 | outer membrane | 5-33, 52-62, 87-101, 111-135, 137-143, 145-152, 190-202, | J: 1, K: 1, L: | 151-215 | 66, 244 |
| | protein (omp15) | 209-221, 233-245, 253-270 | 37 | | |
| HP0714 | RNA polymerase | 19-29, 32-39, 42-48, 75-94, 124-135, 137-145, 152-160, | F: 7 | 48-64 | 67, 245 |
| | sigma-54 factor | 176-182, 193-203, 215-236, 266-273, 275-291, 297-306, | | | |
| | (rpoN) | 311-319, 322-342, 348-360, 369-378, 394-401 | | | |
| HP0717 | DNA polymerase III | 4-11, 13-33, 36-43, 53-63, 65-80, 112-129, 134-141, 143-155, | A: 2, B: 3, | 390-516 | 68, 246 |
| | gamma and tau | 157-168, 178-188, 191-199, 201-207, 215-229, 242-255, | M: 2 | | |
| | subunits (dnaX) | 263-270, 283-315, 320-329, 333-338, 340-349, 412-426, | | | |
| | | 465-478, 485-490, 498-512, 540-554 | | | |
| HP0723 | L-asparaginase II | 4-18, 23-32, 41-47, 54-70, 88-99, 104-111, 118-138, 143-148, | B: 1, F: 1, | 1-90 | 69, 247 |
| | (ansB) | 150-162, 168-175, 181-188, 203-211, 214-220, 227-245, | H: 6, K: 2 | | |
| | | 251-268, 275-281, 287-296, 323-333 | | | |
| HP0727 | transcriptional | 8-34, 38-49, 72-83, 85-91, 94-104, 112-125, 134-142, | B: 2, G: 2, I: 2 | 141-159 | 70, 248 |
| | regulator, putative | 148-168, 181-189, 191-198, 202-214, 222-233, 242-254, | | | |
| | | 256-262, 273-278, 287-294, 314-325 | | | |
| HP0752 | flagellar hook- | 4-24, 30-36, 47-75, 82-105, 124-134, 151-157, 192-202, | A: 7, B: 4, | 64-84, | 71, 249 |
| | associated protein 2 | 208-214, 219-226, 234-247, 285-290, 318-324, 332-340, | C: 2, G: 1, | 93-180, | |
| | (fliD) | 343-349, 380-386, 453-462, 472-478, 484-501, 531-540, | H: 1, I: 3, J: 1, | 181-446 | |
| | | 550-557, 604-612, 620-625, 642-648, 652-671 | K: 2 | | |
| HP0760 | conserved | 12-18, 24-32, 68-75, 77-83, 96-101, 109-116, 129-136, | F: 3, G: 1 | 364-374 | 72, 250 |
| | hypothetical protein | 152-164, 175-184, 190-199, 206-215, 224-233, 241-250, | | | |
| | | 258-264, 273-292, 302-312, 319-331, 334-346, 348-368, | | | |
| | | 387-395, 408-416, 420-429, 437-452 | | | |
| HP0836 | hypothetical protein | 11-28, 36-52, 60-67, 74-79, 108-116 | B: 1, L: 4 | 61-76 | 73, 251 |
| HP0850 | type I restriction | 20-27, 38-49, 69-74, 84-107, 138-145, 161-168, 179-195, | H: 2 | 146-160 | 74, 252 |
| | enzyme M protein | 210-226, 228-252, 267-281, 283-296, 305-311, 333-340, | | | |
| | (hsdM) | 342-356, 361-372, 380-399, 401-414, 458-466, 475-481, | | | |
| | | 492-507, 515-520 | | | |
| HP0853 | ABC transporter, | 43-61, 68-74, 76-90, 120-128, 130-149, 156-161, 164-182, | M: 15 | 261-285 | 75, 253 |
| | ATP-binding | 206-234, 242-252, 269-274, 291-304, 332-345, 349-355, | | | |
| | protein (yheS) | 360-371, 374-388, 434-440, 447-453, 459-465, 469-496, | | | |
| | | 504-522 | | | |
| HP0863 | hypothetical protein | 4-17, 24-30, 37-49, 87-98, 118-124, 126-136, 144-171, | E: 1, M: 11 | 401-427 | 76, 254 |
| | | 176-188, 206-214, 216-228, 233-240, 246-252, 262-271, | | | |
| | | 277-297, 307-330, 333-342, 346-352, 355-361, 368-386, | | | |
| | | 391-400, 413-420, 474-480 | | | |
| HP0874 | hypothetical protein | 15-26, 31-46, 51-72, 80-93, 96-109, 131-137, 150-158, | F: 2 | 173-190 | 77, 255 |
| | | 179-185, 189-209, 211-219, 221-234, 241-247, 255-262, | | | |
| | | 265-271, 283-288 | | | |
| HP0875 | catalase | 28-37, 39-45, 51-58, 77-84, 89-97, 132-148, 171-180, | K: 6 | 425-497 | 78, 256 |
| | | 199-205, 212-218, 220-226, 257-265, 273-300, 307-327, | | | |
| | | 334-340, 344-365, 385-390, 402-408, 426-436, 450-468, | | | |
| | | 476-485 | | | |
| HP0876 | iron-regulated outer | 4-25, 70-76, 80-88, 90-100, 120-128, 162-169, 183-203, | B: 1, E: 1, | 497-509 | 79, 257 |
| | membrane protein | 261-277, 279-289, 291-297, 302-308, 321-327, 339-353, | G: 1, I: 1 | | |
| | (frpB) | 358-377, 392-401, 404-410, 414-422, 443-450, 456-461, | | | |
| | | 470-488, 490-497, 510-535, 570-611, 618-630, 639-647, | | | |
| | | 649-660, 668-690, 702-716, 718-724, 737-747, 750-764 | | | |
| HP0887 | vacuolating | 12-48, 50-64, 99-108, 216-223, 235-241, 244-254, 262-274, | A: 1, B: 5, | 76-100, | 80, 258 |
| | cytotoxin | 287-293, 310-316, 320-326, 361-366, 377-383, 390-395, | C: 2, D: 3, | 270-284, | |
| | | 408-414, 418-425, 438-444, 462-469, 494-505, 524-530, | E: 5, G: 2, | 309-438, | |
| | | 536-547, 551-566, 592-598, 601-613, 678-685, 687-695, | H: 3, I: 2, K: | 493-505, | |
| | | 709-717, 727-737, 751-757, 760-765, 772-778, 782-788, | 9, L: 29, M: 7 | 786-942, | |
| | | 801-807, 822-830, 859-868, 870-878, 884-890, 898-903, | | 947-967 | |
| | | 909-919, 953-969, 973-980, 990-1000, 1002-1019, | | | |
| | | 1041-1047, 1059-1065, 1090-1095, 1116-1127, | | | |
| | | 1130-1139, 1143-1149, 1151-1168, 1178-1183, | | | |
| | | 1188-1195, 1197-1209, 1213-1220, 1226-1234, | | | |
| | | 1236-1247, 1255-1274, 1276-1282 | | | |
| HP0891 | conserved | 4-9, 24-34, 46-95, 97-109, 119-130 | F: 2 | 138-156 | 81, 259 |
| | hypothetical protein | | | | |
| HP0910 | adenine specific | 9-26, 28-35, 43-53, 55-68, 83-92, 99-105, 110-135, 139-149, | E: 33, H: 1 | 92-107, | 82, 260 |
| | DNA | 157-162, 164-170, 173-183, 193-208, 210-230, 239-245, | | 154-173 | |
| | methyltransferase | 253-259, 263-271, 293-305, 310-320, 322-331, 336-343, | | | |
| | (HINDIIM) | 351-364, 367-376 | | | |
| HP0913 | outer membrane | 19-39, 52-62, 108-117, 145-152, 160-168, 194-203, 229-240, | C: 1, I: 1 | 247-260 | 83, 261 |
| | protein (omp21) | 252-268, 280-287, 308-316, 333-339, 383-390, 403-412, | | | |
| | | 414-424, 438-445, 464-472, 479-484, 489-505, 510-526 | | | |
| HP0922 | toxin-like outer | 5-17, 25-52, 60-77, 105-113, 118-125, 162-167, 228-234, | A: 1, B: 3, | 394-549 | 84, 262 |
| | membrane protein | 272-279, 328-334, 341-357, 381-395, 400-406, 512-518, | D: 1, F: 4, | | |
| | | 557-569, 586-592, 645-651, 690-695, 701-709, 720-726, | G: 2 | | |
| | | 733-743, 751-758, 781-786, 879-886, 929-934, 939-944, | | | |
| | | 952-960, 965-975, 994-1001, 1039-1045, 1102-1109, | | | |
| | | 1164-1181, 1198-1206, 1223-1229, 1253-1259, | | | |
| | | 1283-1292, 1312-1317, 1339-1349, 1360-1370, | | | |
| | | 1389-1398, 1400-1412, 1452-1465, 1470-1484, | | | |
| | | 1490-1497, 1519-1525, 1554-1564, 1578-1591, | | | |
| | | 1623-1636, 1638-1646, 1669-1679, 1685-1697, | | | |
| | | 1704-1711, 1713-1720, 1730-1736, 1738-1749, | | | |
| | | 1756-1764, 1778-1786, 1796-1803, 1817-1826, | | | |
| | | 1849-1866, 1975-1993, 2017-2032, 2044-2053, | | | |
| | | 2070-2086, 2091-2109, 2116-2127, 2156-2167, | | | |
| | | 2182-2188, 2197-2202, 2244-2252, 2281-2287, | | | |
| | | 2290-2307, 2350-2361, 2383-2404, 2425-2433, | | | |
| | | 2445-2455, 2495-2505 | | | |
| HP0925 | recombinational | 9-24, 31-53, 57-67, 69-79, 84-114, 133-141, 144-172, | E: 1, G: 1 | 13-46 | 85, 263 |
| | DNA repair protein | 178-186 | | | |
| | (recR) | | | | |
| HP0953 | hypothetical protein | 4-25, 27-35, 43-52, 59-70, 79-91, 115-130, 136-152, 154-163, | J: 3 | 1-58 | 86, 264 |
| | | 170-179 | | | |
| HP0973 | hypothetical protein | 4-30, 49-55, 71-80, 96-105, 111-126, 139-146, 149-162, | B: 3, K: 2 | 250-351 | 87, 265 |
| | | 239-245, 279-285, 290-296, 300-307, 331-337, 343-350 | | | |
| HP0977 | conserved | 9-27, 34-41, 43-51, 92-111, 114-120, 123-131, 139-150, | A: 2 | 214-398 | 88, 266 |
| | hypothetical | 156-171, 176-186, 188-204, 229-241, 252-258, 266-279, | | | |
| | secreted protein | 288-297, 319-334, 338-348, 373-379, 389-398, 431-439, | | | |
| | | 479-484 | | | |
| HP1019 | serine protease | 4-15, 18-27, 47-52, 68-83, 91-97, 104-110, 115-121, 139-147, | A: 3, H: 1, | 232-386 | 89, 267 |
| | (htrA) | 157-164, 198-206, 227-236, 241-254, 264-273, 278-289, | I: 1 | | |
| | | 311-320, 353-361, 372-383, 405-420, 426-434 | | | |
| HP1024 | co-chaperone- | 4-10, 24-34, 91-97, 129-141, 156-163, 184-190, 205-219, | E: 1, G: 1, | 93-116 | 90, 268 |
| | curved DNA | 229-235, 256-273, 278-285 | L: 24 | | |
| | binding protein A | | | | |
| | (CbpA) | | | | |
| HP1052 | UDP-3-0-acyl N- | 7-29, 35-54, 71-83, 85-91, 104-111, 122-134, 138-144, | E: 1, F: 5, G: | 48-66 | 91, 269 |
| | acetylglcosamine | 146-154, 158-174, 177-183, 186-201, 207-215, 223-235, | 14 | | |
| | deacetylase (envA) | 240-247, 262-273, 275-283, 287-292 | | | |
| HP1090 | cell division protein | 7-27, 31-47, 49-70, 75-102, 110-149, 157-171, 217-223, | D: 2, F: 1, | 475-490 | 92, 270 |
| | (ftsK) | 235-251, 294-302, 358-364, 367-375, 387-393, 395-412, | G: 1, H: 1 | | |
| | | 423-430, 441-451, 456-470, 472-486, 488-495, 499-509, | | | |
| | | 515-529, 536-549, 556-570, 574-603, 607-615, 625-633, | | | |
| | | 642-658, 670-676, 683-702, 708-716, 720-726, 747-756, | | | |
| | | 763-784, 803-812, 815-826 | | | |
| HP1098 | conserved | 7-22, 30-38, 53-59, 64-75, 83-95, 97-112, 120-131, 133-142, | A: 4, B: 1, | 9-156, | 93, 271 |
| | hypothetical | 145-151, 154-166, 172-180, 189-203, 227-238, 277-287 | F: 1, I: 2, K: 1 | 174-287 | |
| | secreted protein | | | | |
| HP1116 | hypothetical protein | 13-23, 25-32, 111-117, 150-164, 185-193, 207-212, 216-224, | I: 1, K: 2, L: | 66-86 | 94, 272 |
| | | 230-236, 263-272, 304-311, 342-348, 374-385, 391-407, | 31 | | |
| | | 444-458, 480-487, 489-499, 523-542, 544-558, 572-579, | | | |
| | | 620-640, 686-696, 703-710, 742-755, 765-772, 817-822, | | | |
| | | 830-837, 865-872, 931-937 | | | |
| HP1117 | conserved | 4-27, 49-56, 62-70, 86-92, 121-127, 151-163, 170-182, | A: 1, F: 4 | 234-254 | 95, 273 |
| | hypothetical | 195-202, 212-226, 237-243 | | | |
| | secreted protein | | | | |
| HP1119 | flagellar hook- | 4-10, 13-24, 39-51, 62-78, 92-104, 107-117, 134-141, | A: 7, B: 1, | 252-483 | 96, 274 |
| | associated protein 1 | 156-161, 166-181, 210-216, 222-229, 256-266, 273-280, | D: 1, F: 3, J: 1 | | |
| | (HAP1) (flgK) | 297-304, 313-330, 336-349, 371-376, 433-439, 443-448, | | | |
| | | 488-493, 506-515, 527-534, 560-572, 575-583, 587-593 | | | |
| HP1126 | colicin tolerance-like | 4-15, 21-38, 45-56, 81-95, 102-108, 118-130, 133-147, | A: 3, B: 2, J: 1 | 24-146 | 97, 275 |
| | protein (tolB) | 152-162, 166-171, 199-204, 211-218, 230-240, 253-261, | | | |
| | | 274-283, 288-294, 312-317, 325-336, 344-357, 391-414 | | | |
| HP1152 | signal recognition | 26-31, 38-56, 65-82, 90-101, 112-119, 123-153, 175-188, | D: 1, F: 4, | 290-306 | 98, 276 |
| | particle protein (ffh) | 197-216, 234-242, 249-265, 273-286, 290-305, 327-335, | G: 10 | | |
| | | 338-346, 361-372, 394-404 | | | |
| HP1153 | valyl-tRNA | 17-26, 43-48, 50-73, 81-93, 95-107, 139-146, 158-168, | F: 4, G: 3, L: 3 | 820-851 | 99, 277 |
| | synthetase (valS) | 171-176, 190-196, 202-212, 216-223, 243-266, 274-282, | | | |
| | | 308-313, 324-330, 344-378, 380-387, 403-422, 427-443, | | | |
| | | 448-455, 457-465, 491-515, 517-528, 553-567, 589-599, | | | |
| | | 610-617, 642-648, 670-697, 709-717, 726-743, 745-759, | | | |
| | | 769-803, 807-823, 840-849 | | | |
| HP1186 | carbonic anhydrase | 4-18, 39-48, 53-63, 66-90, 102-117, 125-134, 137-145, | D: 5, H: 1 | 26-40, | 100, 278 |
| | | 156-162, 169-197 | | 56-80 | |
| HP1198 | DNA-directed RNA | 21-33, 36-42, 49-60, 68-76, 91-105, 123-130, 141-161, | A: 26, B: 14, | 213-344, | 101, 279 |
| | polymerase, beta | 169-178, 185-190, 192-199, 205-214, 223-233, 239-247, | C: 25, D: 3, | 954-1080, | |
| | subunit (rpoB) | 260-269, 284-293, 300-314, 324-352, 357-364, 373-382, | F: 1, G: 3, I: | 2524-2733 | |
| | | 389-403, 420-432, 438-446, 466-471, 477-484, 503-509, | 3, J: 31, K: 2 | | |
| | | 549-556, 558-576, 600-623, 625-635, 654-661, 663-669, | | | |
| | | 671-687, 702-716, 735-741, 744-750, 757-766, 776-786, | | | |
| | | 807-815, 824-832, 854-860, 863-897, 909-915, 920-946, | | | |
| | | 952-959, 982-997, 1024-1038, 1049-1055, 1071-1085, | | | |
| | | 1104-1113, 1121-1132, 1138-1150, 1187-1196, | | | |
| | | 1212-1221, 1227-1236, 1257-1262, 1264-1278, | | | |
| | | 1282-1294, 1307-1318, 1353-1370, 1382-1388, | | | |
| | | 1396-1409, 1434-1440, 1446-1454, 1465-1478, | | | |
| | | 1485-1513, 1516-1529, 1540-1545, 1563-1568, | | | |
| | | 1575-1593, 1607-1616, 1628-1645, 1648-1661, | | | |
| | | 1676-1682, 1689-1697, 1713-1719, 1739-1749, | | | |
| | | 1753-1758, 1763-1774, 1797-1803, 1807-1846, | | | |
| | | 1855-1874, 1877-1891, 1893-1907, 1912-1925, | | | |
| | | 1931-1943, 1955-1965, 1976-1990, 2032-2043, | | | |
| | | 2045-2051, 2099-2105, 2131-2138, 2161-2179, | | | |
| | | 2188-2199, 2205-2216, 2219-2227, 2235-2245, | | | |
| | | 2247-2267, 2277-2288, 2294-2304, 2314-2326, | | | |
| | | 2346-2358, 2365-2377, 2383-2402, 2407-2423, | | | |
| | | 2437-2450, 2454-2473, 2489-2497, 2525-2531, | | | |
| | | 2557-2570, 2580-2587, 2589-2599, 2621-2641, | | | |
| | | 2647-2653, 2661-2677, 2685-2690, 2697-2717, | | | |
| | | 2722-2733, 2739-2777, 2786-2793, 2801-2808, | | | |
| | | 2811-2822, 2825-2835, 2838-2845, 2859-2871, | | | |
| | | 2877-2883 | | | |
| HP1205 | translation | 10-16, 18-23, 28-41, 63-69, 77-91, 101-109, 118-136, | A: 4, B: 1 | 178-328 | 102, 280 |
| | elongation factor | 146-153, 155-162, 168-179, 192-207, 217-226, 229-235, | | | |
| | EF-Tu (tufB) | 239-254, 279-286, 294-307, 313-319, 334-341, 344-353, | | | |
| | | 363-377, 390-396 | | | |
| HP1229 | aspartokinase (lysC) | 18-42, 68-84, 89-95, 100-105, 107-115, 125-135, 154-177, | I: 1, K: 1, L: 3 | 85-97 | 103, 281 |
| | | 189-195, 205-228, 236-243, 252-259, 279-300, 309-316, | | | |
| | | 323-331, 340-351, 353-364, 377-402 | | | |
| HP1243 | outer membrane | 4-18, 26-32, 66-76, 100-126, 151-159, 178-186, 188-194, | B: 3, F: 1, G: | 21-200, | 104, 282 |
| | protein (omp28) | 200-210, 241-248, 253-259, 262-279, 284-291, 307-313, | 1, H: 1 | 468-480 | |
| | | 315-322, 327-337, 376-386, 399-407, 432-441, 467-473, | | | |
| | | 487-497, 499-505, 543-549, 560-568, 585-593, 598-604, | | | |
| | | 608-614, 630-642, 647-653, 690-703, 717-730 | | | |
| HP1254 | biotin synthesis | 17-49, 52-58, 62-73, 78-97, 100-117, 122-172, 185-190, | H: 2, I: 2 | 33-42 | 105, 283 |
| | protein (bioC) | 193-217, 225-236 | | | |
| HP1265 | hypothetical protein | 7-39, 50-58, 73-89, 96-107, 109-120, 126-142, 152-170, | F: 2, G: 6, I: 1 | 158-169 | 106, 284 |
| | | 178-202, 205-211, 224-244, 249-259, 261-270, 300-310, | | | |
| | | 312-325 | | | |
| HP1282 | anthranilate | 4-31, 40-64, 71-82, 85-92, 102-124, 126-139, 147-152, | E: 20, G: 1, | 201-221 | 107, 285 |
| | synthase component | 159-173, 176-188, 195-207, 210-216, 234-241, 249-256, | I: 1 | | |
| | I (trpE) | 258-276, 279-293, 296-302, 310-315, 349-356, 363-378, | | | |
| | | 380-403, 411-426, 435-441, 448-459, 463-476, 488-494 | | | |
| HP1329 | cation efflux system | 5-13, 15-74, 87-104, 107-120, 123-129, 136-145, 150-191, | B: 2, F: 1, J: | 236-259 | 108, 286 |
| | protein (czcA) | 193-206, 227-248, 250-264, 278-302, 304-323, 332-378, | 1, L: 2 | | |
| | | 384-407, 409-419, 425-457, 462-471, 474-497, 511-545, | | | |
| | | 555-564, 571-578, 585-598, 640-647, 669-675, 682-691, | | | |
| | | 693-705, 729-743, 752-761, 772-780, 786-804, 808-818, | | | |
| | | 822-846, 858-880, 884-900, 910-939, 941-947, 962-971, | | | |
| | | 973-988, 998-1003, 1007-1027 | | | |
| HP1339 | biopolymer | 4-19, 27-68, 81-111, 121-160 | F: 5, I: 4 | 60-79 | 109, 287 |
| | transport protein | | | | |
| | (exbB) | | | | |
| HP1341 | siderophore- | 4-37, 40-46, 52-57, 199-205, 222-229, 236-244, 250-267, | A: 20, B: 23, | 27-197 | 110, 288 |
| | mediated iron | 269-282 | C: 30, E: 31, | | |
| | transport protein | | F: 5, G: 3, | | |
| | | | H: 6, I: 1, J: | | |
| | | | 2, K: 5 | | |
| HP1342 | outer membrane | 4-16, 24-30, 32-38, 63-75, 86-92, 98-111, 113-126, | A: 1, B: 3, | 546-559 | 111, 289 |
| | protein (omp29) | 160-165, 170-180, 198-204, 227-233, 239-245, 253-273, | C: 1, D: 1, | | |
| | | 308-314, 352-365, 382-387, 395-403, 423-429, | E: 1, F: 2, | | |
| | | 472-482, 484-493, 501-507, 518-526, 536-541, 543-550, | H: 7 | | |
| | | 556-562, 586-600, 626-633, 649-661, 680-688 | | | |
| HP1345 | phosphoglycerate | 16-33, 48-59, 63-71, 77-92, 94-109, 117-124, 139-151, | D: 20, I: 6 | 258-272 | 112, 290 |
| | kinase | 169-181, 184-227, 233-249, 251-261, 263-275, 282-294, | | | |
| | | 297-321, 326-332, 341-355, 383-399 | | | |
| HP1350 | protease | 11-26, 31-39, 43-52, 55-62, 64-70, 80-94, 123-133, 135-141, | A: 3, B: 1, | 77-226, | 113, 291 |
| | | 172-181, 185-206, 209-218, 224-230, 238-244, 251-262, | C: 1, G: 1, | 350-429 | |
| | | 264-271, 290-301, 306-324, 333-340, 350-357, 367-375, | K: 2, M: 12 | | |
| | | 390-397, 434-441, 443-448 | | | |
| HP1374 | ATP-dependent | 4-13, 22-27, 31-45, 50-59, 72-96, 99-114, 131-141, 143-150, | G: 9, M: 2 | 283-305 | 114, 292 |
| | protease ATPase | 159-176, 180-186, 189-198, 208-214, 234-253, 271-287, | | | |
| | subunit (clpX) | 294-299, 310-366, 382-390, 398-416, 424-443 | | | |
| HP1393 | DNA repair protein | 9-26, 30-53, 62-72, 86-95, 112-122, 136-145, 153-160, | E: 1, F: 2, G: | 213-232 | 115, 293 |
| | (recN) | 209-221, 227-237, 241-268, 281-288, 291-298, 308-314, | 7, I: 1 | | |
| | | 321-328, 336-346, 351-379, 388-397, 409-416, 423-433, | | | |
| | | 443-481, 511-519 | | | |
| HP1448 | ribonuclease P, | 12-18, 25-31, 38-50, 59-67, 71-82, 96-126 | G: 6 | 76-88 | 116, 294 |
| | protein component | | | | |
| | (rnpA) | | | | |
| HP1453 | conserved | 4-25, 39-44, 64-71, 74-88, 100-113, 128-138, 151-162, | B: 1, D: 4, | 2-100 | 117, 295 |
| | hypothetical protein | 164-177, 185-190, 204-213, 233-239, 246-254, 281-286, | F: 2, J: 1, K: | | |
| | | 293-306, 309-318, 333-347, 349-359, 385-398, 404-423, | 11, L: 3 | | |
| | | 458-465, 477-484, 490-499, 501-533, 554-566, 582-590, | | | |
| | | 596-616, 624-629, 631-639, 654-680, 694-720, 735-743 | | | |
| HP1454 | hypothetical protein | 4-16, 36-41, 52-75, 98-107, 109-117, 122-128, 133-139, | B: 1, M: 8 | 75-92 | 118, 296 |
| | | 141-155, 159-165, 169-182, 187-193, 195-201, 211-224, | | | |
| | | 230-236, 247-269, 278-290 | | | |
| HP1460 | DNA polymerase III | 7-21, 25-33, 37-43, 87-94, 103-120, 131-147, 168-174, | F: 3, G: 2, I: 3 | 732-748 | 119, 297 |
| | alpha-subunit | 197-203, 207-212, 227-237, 247-257, 263-271, 279-287, | | | |
| | (dnaE) | 298-306, 320-325, 332-340, 363-374, 379-384, 390-401, | | | |
| | | 403-414, 428-433, 448-457, 462-475, 483-490, 513-519, | | | |
| | | 525-535, 543-554, 559-566, 571-620, 625-631, 636-642, | | | |
| | | 659-670, 688-706, 708-723, 770-779, 787-793, 796-807, | | | |
| | | 820-840, 848-854, 863-874, 895-905, 912-919, 934-942, | | | |
| | | 968-975, 983-1000, 1012-1019, 1026-1036, 1050-1060, | | | |
| | | 1064-1070, 1081-1091, 1094-1108, 1112-1118, | | | |
| | | 1140-1152, 1164-1169, 1172-1180, 1187-1192 | | | |
| HP1497 | peptidyl-tRNA | 23-40, 42-59, 66-73, 78-97, 111-128, 130-141, 157-166, | E: 6, F: 1, | 53-71 | 120, 298 |
| | hydrolase (pth) | 178-183 | H: 2 | | |
| HP1527 | hypothetical protein | 4-27, 38-44, 47-57, 59-85, 99-106, 114-121, 154-166, | B: 3, C: 1, I: 7 | 86-195 | 121, 299 |
| | | 181-186, 193-198, 238-244, 253-262, 272-278, 287-299, | | | |
| | | 314-320, 338-350, 358-368, 382-388, 407-416, 433-446, | | | |
| | | 456-461, 463-473 | | | |
| HP1564 | outer membrane | 5-24, 38-59, 64-80, 87-99, 105-126, 134-142, 149-163, | A: 2, B: 1, | 87-245 | 122, 300 |
| | protein | 165-179, 181-202, 205-220, 227-233, 243-250, 257-263 | C: 3, F: 1, | | |
| | | | H: 1 | | |
| HP1565 | pencillin-binding | 5-32, 47-53, 66-79, 81-97, 115-151, 155-174, 183-188, | A: 1, F: 2, | 347-371, | 123, 301 |
| | protein 2 (pbp2) | 196-210, 215-226, 230-238, 253-258, 263-270, 276-282, | H: 1, L: 5 | 375-386 | |
| | | 295-301, 304-325, 334-344, 360-390, 397-412, 425-432, | | | |
| | | 434-462, 478-494, 508-526, 539-564, 571-579 | | | |
| HP1574 | riboflavin synthase | 4-15, 36-44, 49-56, 60-66, 68-82, 84-103, 109-115, 118-141, | H: 1, M: 5 | 26-39 | 124, 302 |
| | alpha subunit (ribC) | 147-154, 160-168, 176-185 | | | |
| ARF0044 | Hypothetical | 7-13, 23-33 | H: 1, I: 2 | 13-21 | 125, 303 |
| | protein | | | | |
| ARF0048 | Hypothetical | none | F: 1, G: 1, I: | 2-10 | 126, 304 |
| | protein | | 4, L: 8 | | |
| ARF0143 | Hypothetical | 4-9, 12-18, 35-42, 49-62 | F: 1 | 6-18 | 127, 305 |
| | protein | | | | |
| ARF0184 | Hypothetical | 19-25 | A: 1, I: 6 | 1-13 | 128, 306 |
| | protein | | | | |
| ARF0219 | Hypothetical | 15-21, 27-45 | E: 7 | 12-25 | 129, 307 |
| | protein | | | | |
| ARF0308 | Hypothetical | 14-20 | E: 41 | 1-14 | 130, 308 |
| | protein | | | | |
| ARF0349 | Hypothetical | 4-18 | G: 11 | 13-26 | 131, 309 |
| | protein | | | | |
| ARF0387 | Hypothetical | 8-21 | G: 12, H: 2, | 2-20 | 132, 310 |
| | protein | | K: 1 | | |
| ARF0402 | Hypothetical | 4-14 | F: 2, G: 10, | 4-16 | 133, 311 |
| | protein | | H: 1, M: 2 | | |
| ARF0501 | Hypothetical | none | M: 2 | 3-12 | 134, 312 |
| | protein | | | | |
| ARF0509 | Hypothetical | 6-14, 6-25, 35-57 | G: 5, H: 1, | 2-14 | 135, 313 |
| | protein | | M: 3 | | |
| ARF0522 | Hypothetical | 6-25, 35-57 | F: 1, I: 3, K: 2 | 17-31 | 136, 314 |
| | protein | | | | |
| ARF0578 | Hypothetical | 14-25, 32-46 | E: 12, G: 1 | 5-19 | 137, 315 |
| | protein | | | | |
| ARF0629 | Hypothetical | 18-31 | G: 1, I: 7 | 5-16 | 138, 316 |
| | protein | | | | |
| ARF0665 | Hypothetical | 19-24 | L: 2, M: 5 | 4-26 | 139, 317 |
| | protein | | | | |
| ARF0693 | Hypothetical | 13-21, 29-34, 47-58, 61-73 | G: 1, I: 6 | 36-47 | 140, 318 |
| | protein | | | | |
| ARF0752 | Hypothetical | 4-15 | D: 3 | 5-24 | 141, 319 |
| | protein | | | | |
| ARF0788 | Hypothetical | none | B: 1, H: 1 | 6-18 | 142, 320 |
| | protein | | | | |
| ARF0819 | Hypothetical | 13-20 | F: 14 | 4-13 | 143, 321 |
| | protein | | | | |
| ARF0839 | Hypothetical | none | A: 2, C: 1, I: | 15-23 | 144, 322 |
| | protein | | 1, K: 3 | | |
| ARF0868 | Hypothetical | 4-9 | F: 2, G: 1 | 7-21 | 145, 323 |
| | protein | | | | |
| ARF0948 | Hypothetical | none | F: 1 | 1-10 | 146, 324 |
| | protein | | | | |
| ARF0969 | Hypothetical | none | B: 1, G: 1, | 4-14 | 147, 325 |
| | protein | | M: 2 | | |
| ARF1100 | Hypothetical | 4-17, 35-41, 46-89, 93-98 | A: 1, B: 1, | 70-88 | 148, 326 |
| | protein | | H: 1, I: 2, | | |
| | | | M: 5 | | |
| ARF1164 | Hypothetical | none | G: 1, H: 3, J: | 1-13 | 149, 327 |
| | protein | | 1, M: 2 | | |
| ARF1470 | Hypothetical | 4-16, 26-32 | G: 1, I: 1, | 25-38 | 150, 328 |
| | protein | | M: 2 | | |
| ARF1553 | Hypothetical | 8-15, 23-28 | B: 2, F: 6, G: | 4-17 | 151, 329 |
| | protein | | 2, H: 1, I: 1, | | |
| | | | K: 1 | | |
| CRF0017 | Hypothetical | 4-12 | H: 1, I: 1, | 1-15 | 152, 330 |
| | protein | | M: 5 | | |
| CRF0025 | Hypothetical | 4-29, 31-42, 52-58 | E: 1, G: 1, | 6-16 | 153, 331 |
| | protein | | L: 3, M: 1 | | |
| CRF0090 | Hypothetical | 4-9, 24-32 | F: 13, G: 1, | 9-19 | 154, 332 |
| | protein | | H: 1, L: 1 | | |
| CRF0127 | Hypothetical | 4-12, 18-27 | L: 3, M: 10 | 5-18 | 155, 333 |
| | protein | | | | |
| CRF0169 | Hypothetical | 4-11, 37-56, 58-92 | D: 3 | 18-29 | 156, 334 |
| | protein | | | | |
| CRF0190 | Hypothetical | 8-28 | M: 14 | 20-35 | 157, 335 |
| | protein | | | | |
| CRF0251 | Hypothetical | none | D: 16, E: 2, | 4-15 | 158, 336 |
| | protein | | G: 3 | | |
| CRF0258 | Hypothetical | 4-23, 27-39, 55-63 | A: 1, B: 1, | 35-58 | 159, 337 |
| | protein | | C: 1, F: 1, L: 5 | | |
| CRF0354 | Hypothetical | 6-26, 28-54 | F: 8, H: 1 | 28-47 | 160, 338 |
| | protein | | | | |
| CRF0388 | Hypothetical | 4-10, 38-52, 58-82 | H: 1, L: 3 | 30-49 | 161, 339 |
| | protein | | | | |
| CRF0409 | Hypothetical | 4-22, 29-35, 44-50, 53-68, 70-80 | G: 2, H: 1, | 20-33 | 162, 340 |
| | protein | | M: 10 | | |
| CRF0421 | Hypothetical | 22-28, 30-36 | F: 4 | 18-33 | 163, 341 |
| | protein | | | | |
| CRF0480 | Hypothetical | 4-11, 13-21, 25-30 | E: 1, L: 8 | 20-30 | 164, 342 |
| | protein | | | | |
| CRF0552 | Hypothetical | 10-22 | G: 1, M: 5 | 10-23 | 165, 343 |
| | protein | | | | |
| CRF0563 | Hypothetical | 4-11 | G: 1, L: 1, | 9-20 | 166, 344 |
| | protein | | M: 6 | | |
| CRF0578 | Hypothetical | 14-25, 32-46 | G: 1, L: 7, | 6-19 | 167, 345 |
| | protein | | M: 12 | | |
| CRF0626 | Hypothetical | 5-30 | L: 43 | 14-33 | 168, 346 |
| | protein | | | | |
| CRF0870 | Hypothetical | 4-15, 28-35, 46-55, 59-65, 76-84 | H: 6, I: 1, L: 8 | 9-24 | 169, 347 |
| | protein | | | | |
| CRF0894 | Hypothetical | 27-33 | L: 5 | 5-19 | 170, 348 |
| | protein | | | | |
| CRF0922 | Hypothetical | 5-13 | E: 11, F: 3, | 8-18 | 171, 349 |
| | protein | | G: 1, H: 7, I: | | |
| | | | 1, L: 4 | | |
| CRF1012 | Hypothetical | 9-22, 24-34 | L: 3 | 21-40 | 172, 350 |
| | protein | | | | |
| CRF1100 | Hypothetical | 4-17, 35-41, 46-89, 93-98 | E: 1, H: 5, I: | 71-89 | 173, 351 |
| | protein | | 2, L: 4 | | |
| CRF1301 | Hypothetical | 4-12, 14-24 | H: 9, I: 2 | 2-17 | 174, 352 |
| | protein | | | | |
| CRF1354 | Hypothetical | 9-17 | I: 2, M: 16 | 5-16 | 175, 353 |
| | protein | | | | |
| CRF1422 | Hypothetical | 7-41, 48-58, 63-75, 80-89 | G: 2, H: 1, | 43-53 | 176, 354 |
| | protein | | L: 62 | | |
| CRF1489 | Hypothetical | 4-22, 25-30 | E: 1, F: 1, | 4-14 | 177, 355 |
| | protein | | H: 5, L: 10 | | |
| CRF1549 | Hypothetical | 4-55 | G: 1, M: 7 | 18-33 | 178, 356 |
| | protein | | | | |

[0332] TABLE 2
Gene distribution in H. pylori strains.

| H. pylori antigenic | Putative function | Gene distribution | Amino acid substitutions (in | Seq. ID |
|---|---|---|---|---|
| protein | (by homology) | (presence in 28 strains) | cancer patient isolate)* | (DNA, Prot.) |
| HP0009 | outer membrane protein (omp1) | n.d. | n.d. | 1, 179 |
| HP0010 | chaperone and heat shock | n.d. | n.d. | 2, 180 |
| | protein (groEL) | | | |
| HP0043 | mannose-6-phosphate isomerase | 28/28 | 11/247 | 3, 181 |
| | (pmi) | | | |
| HP0063 | hypothetical protein | n.d. | n.d. | 4, 182 |
| HP0067 | urease accessory protein (ureH) | 13/28 | 9/230 | 5, 183 |
| HP0072 | urease beta subunit (urea | n.d. | n.d. | 6, 184 |
| | amidohydrolase) (ureB) | | | |
| HP0086 | Conserved hypothetical protein | 28/28 | 1/221 | 7, 185 |
| HP0087 | hypothetical protein | 28/28 | 15/241 | 8, 186 |
| HP0088 | RNA polymerase sigma-70 factor | 28/28 | 4/226 | 9, 187 |
| | (rpoD) | | | |
| HP0089 | pfs protein (pfs) | 28/28 | 5/199 | 10, 188 |
| HP0115 | flagellin B (flaB) | 28/28 | 2/249 | 11, 189 |
| HP0175 | cell binding factor 2 | n.d. | n.d. | 12, 190 |
| HP0121 | phosphoenolpyruvate synthase | 28/28 | 0/240 | 13, 191 |
| | (ppsA) | | | |
| HP0123 | threonyl-tRNA synthetase (thrS) | 28/28 | 7/238 | 14, 192 |
| HP0130 | hypothetical protein | 28/28 | 8/241 | 15, 193 |
| HP0150 | hypothetical protein | 28/28 | 5/111 | 16, 194 |
| HP0183 | serine hydroxymethyltransferase | 28/28 | 2/227 | 17, 195 |
| | (glyA) | | | |
| HP0192 | fumarate reductase, flavoprotein | 28/28 | 3/219 | 18, 196 |
| | subunit (frdA) | | | |
| HP0197 | S-adenosylmethionine | 28/28 | 1/243 | 19, 197 |
| | synthetase 2 (metX) | | | |
| HP0201 | fatty acid/phospholipid synthesis | 28/28 | 0/176 | 20, 198 |
| | protein (plsX) | | | |
| HP0202 | beta-ketoacyl-acyl carrier protein | 28/28 | 7/232 | 21, 199 |
| | synthase III | | | |
| HP0210 | chaperone and heat shock | n.d. | n.d. | 22, 200 |
| | protein C62.5 (htpG) | | | |
| HP0211 | conserved hypothetical secreted | 28/28 | 3/201 | 23, 201 |
| | protein | | | |
| HP0228 | conserved hypothetical integral | 28/28 | 3/248 | 24, 202 |
| | membrane protein | | | |
| HP0229 | outer membrane protein (omp6) | n.d. | n.d. | 25, 203 |
| HP0235 | conserved hypothetical secreted | n.d. | n.d. | 26, 204 |
| | protein | | | |
| HP0239 | glutamyl-tRNA reductase | 7/28 | 4/257^{#} | 27, 205 |
| | (hemA) | | | |
| HP0258 | conserved hypothetical integral | 28/28 | 14/254 | 28, 206 |
| | membrane protein | | | |
| HP0266 | dihydroorotase (pyrC) | 15/28 | 14/253 | 29, 207 |
| HP0279 | lipopolysaccharide | 28/28 | 15/246 | 30, 208 |
| | heptosyltransferase-1 (rfaC) | | | |
| HP0289 | toxin-like outer membrane | 28/28 | 12/241 | 31, 209 |
| | protein | | | |
| HP0292 | hypothetical protein | 28/28 | 9/245 | 32, 210 |
| HP0295 | flagellin B homolog (fla) | 14/28 | 9/224^{#} | 33, 211 |
| HP0349 | CTP synthetase (pyrG) | 28/28 | 2/249 | 34, 212 |
| HP0351 | flagellar basal-body M-ring | 28/28 | 2/249 | 35, 213 |
| | protein (fliF) | | | |
| HP0380 | glutamate dehydrogenase | 28/28 | 9/253 | 36, 214 |
| | (gdhA) | | | |
| HP0392 | histidine kinase (cheA) | 27/28 | 4/259; 5 aa inserted, 4 aa | 37, 215 |
| | | | deleted | |
| HP0401 | 3-phosphoshikimate 1- | 28/28 | 14/248 | 38, 216 |
| | carboxyvinyltransferase (aroA) | | | |
| HP0406 | hypothetical protein | 28/28 | 2/146 | 39, 217 |
| HP0409 | GMP synthase (guaA) | 28/28 | 9/252 | 40, 218 |
| HP0413 | transposase-like protein, PS3IS | 10/28 | 0/268^{#} | 41, 219 |
| HP0459 | virB4 homolog (virB4) | 9/28 | 6/248^{#} | 42, 220 |
| HP0480 | GTP-binding protein, fusA- | n.d. | n.d. | 43, 221 |
| | homolog (yihK) | | | |
| HP0485 | catalase-like protein | 28/28 | 7/252 | 44, 222 |
| HP0508 | hypothetical protein | 28/28 | 3/260 | 45, 223 |
| HP0519 | conserved hypothetical protein | 28/28 | 6/224; 1 aa inserted, 1 aa | 46, 224 |
| | | | deleted | |
| HP0525 | vitB11 homolog | 24/28 | 0/257 | 47, 225 |
| HP0527 | cag pathogenicity island protein | 22/28 | 4/214 | 48, 226 |
| | (cag7-cagY) | | | |
| HP0540 | cag pathogenicity island protein | 25/28 | 5/251 | 49, 227 |
| | (cag19) | | | |
| HP0541 | cag pathogenicity island protein | 26/28 | 3/251 | 50, 228 |
| | (cag20) | | | |
| HP0542 | cag pathogenicity island protein | 23/28 | 0/115 | 51, 229 |
| | (cag21-cagG) | | | |
| HP0544 | cag pathogenicity island protein | 11/28 | n.d. | 52, 230 |
| | (cag23-cagE) | | | |
| HP0545 | cag pathogenicity island protein | 25/28 | 1/153 | 53, 231 |
| | (cag24) | | | |
| HP547 | cag pathogenicity island protein | 24/28 | 20/256; 1 aa inserted^{#} | 54, 232 |
| | (cag26-cagA) | | | |
| HP0563 | hypothetical protein | 28/28 | 9/192 | 55, 233 |
| HP0604 | uroporphyrinogen | 28/28 | 5/260 | 56, 234 |
| | decarboxylase (hemE) | | | |
| HP0607 | acriflavine resistance protein | 28/28 | 0/254 | 57, 235 |
| | (acrB) | | | |
| HP0630 | modulator of drug activity | 28/28 | 2/112^{#} | 58, 236 |
| | (mda66) | | | |
| HP0635 | hypothetical protein | 24/28 | 13/135 | 59, 237 |
| HP0655 | protective surface antigen D15 | 28/28 | n.d. | 60, 238 |
| HP0659 | hypothetical protein | 6/28 | 14/187 | 61, 239 |
| HP0683 | UDP-N-acetylglucosamine | 28/28 | 8/193 | 62, 240 |
| | pyrophosphorylase (glmU) | | | |
| HP0687 | iron(II) transport protein (feoB) | 28/28 | 2/203 | 63, 241 |
| HP0696 | N-methylhydantoinase | 28/28 | 2/206 | 64, 242 |
| HP0701 | DNA gyrase, sub A (gyrA) | 28/28 | 5/224 | 65, 243 |
| HP0706 | outer membrane protein (omp15) | 28/28 | 2/167 | 66, 244 |
| HP0714 | RNA polymerase sigma-54 factor | 28/28 | 8/200 | 67, 245 |
| | (rpoN) | | | |
| HP0717 | DNA polymerase III gamma and | 28/28 | 15/137; 2 aa inserted^{#} | 68, 246 |
| | tau subunits (dnaX) | | | |
| HP0723 | L-asparaginase II (ansB) | 28/28 | 12/220 | 69, 247 |
| HP0727 | transcriptional regulator, | 28/28 | 4/207 | 70, 248 |
| | putative | | | |
| HP0752 | flagellar hook-associated protein | 28/28 | 2/191 | 71, 249 |
| | 2 (fliD) | | | |
| HP0760 | conserved hypothetical protein | 28/28 | 2/211 | 72, 250 |
| HP0836 | hypothetical protein | 28/28 | 1/82 | 73, 251 |
| HP0850 | type I restriction enzyme M | 28/28 | 10/181 | 74, 252 |
| | protein (hsdM) | | | |
| HP0853 | ABC transporter, ATP-binding | 19/28 | 2/198^{#} | 75, 253 |
| | protein (yheS) | | | |
| HP0863 | hypothetical protein | 27/28 | 2/161 | 76, 254 |
| HP0874 | hypothetical protein | 28/28 | 3/243 | 77, 255 |
| HP0875 | catalase | n.d. | n.d. | 78, 256 |
| HP0876 | iron-regulated outer membrane | 28/28 | 4/193 | 79, 257 |
| | protein (frpB) | | | |
| HP0887 | vacuolating cytotoxin | 28/28 | 9/228^{#} | 80, 258 |
| HP0891 | conserved hypothetical protein | 18/28 | 2/149^{#} | 81, 259 |
| HP0910 | adenine specific DNA | 27/28 | 3/205 | 82, 260 |
| | methyltransferase (HINDIIM) | | | |
| HP0913 | outer membrane protein (omp21) | 28/28 | 12/172; 1 aa deleted | 83, 261 |
| HP0922 | toxin-like outer membrane | 28/28 | 27/198 | 84, 262 |
| | protein | | | |
| HP0925 | recombinational DNA repair | 28/28 | 1/159 | 85, 263 |
| | protein (recR) | | | |
| HP0953 | hypothetical protein | 28/28 | 2/164 | 86, 264 |
| HP0973 | hypothetical protein | 19/28 | 6/248; 1 aa deleted | 87, 265 |
| HP0977 | conserved hypothetical secreted | 28/28 | 9/238 | 88, 266 |
| | protein | | | |
| HP1019 | serine protease (htrA) | n.d. | n.d. | 89, 267 |
| HP1024 | co-chaperone-curved DNA | 25/28 | 5/167 | 90, 268 |
| | binding protein A (CbpA) | | | |
| HP1052 | UDP-3-0-acyl N- | 28/28 | 5/186 | 91, 269 |
| | acetylglcosamine deacetylase | | | |
| | (envA) | | | |
| HP1090 | cell division protein (ftsK) | 28/28 | 2/223 | 92, 270 |
| HP1098 | conserved hypothetical secreted | n.d. | n.d. | 93, 271 |
| | protein | | | |
| HP1116 | hypothetical protein | 28/28 | 192/283 | 94, 272 |
| HP1117 | conserved hypothetical secreted | n.d. | n.d. | 95, 273 |
| | protein | | | |
| HP1119 | flagellar hook-associated protein | 28/28 | 7/213 | 96, 274 |
| | 1 (HAP1) (flgK) | | | |
| HP1126 | colicin tolerance-like protein | 28/28 | 4/241 | 97, 275 |
| | (tolB) | | | |
| HP1152 | signal recognition particle | n.d. | n.d. | 98, 276 |
| | protein (ffh) | | | |
| HP1153 | valyl-tRNA synthetase (valS) | 28/28 | 14/243 | 99, 277 |
| HP1186 | carbonic anhydrase | | | 100, 278 |
| HP1198 | DNA-directed RNA polymerase, | 28/28 | 7/232 | 101, 279 |
| | beta subunit (rpoB) | | | |
| HP1205 | translation elongation factor EF- | n.d. | n.d. | 102, 280 |
| | Tu (tufB) | | | |
| HP1229 | aspartokinase (lysC) | 2728 | 4/245^{#} | 103, 281 |
| HP1243 | outer membrane protein (omp28) | n.d. | n.d. | 104, 282 |
| HP1254 | biotin synthesis protein (bioC) | 28/28 | 9/169 | 105, 283 |
| HP1265 | hypothetical protein | 28/28 | 19/216 | 106, 284 |
| HP1282 | anthranilate synthase component | 28/28 | 12/193 | 107, 285 |
| | I (trpE) | | | |
| HP1329 | cation efflux system protein | 28/28 | 3/196 | 108, 286 |
| | (czcA) | | | |
| HP1339 | biopolymer transport protein | 27/28 | 1/109^{#} | 109, 287 |
| | (exbB) | | | |
| HP1341 | siderophore-mediated iron | 28/28 | 12/179^{#} | 110, 288 |
| | transport protein | | | |
| HP1342 | outer membrane protein (omp29) | n.d. | n.d. | 111, 289 |
| HP1345 | phosphoglycerate kinase | 28/28 | 3/220 | 112, 290 |
| HP1350 | protease | n.d. | n.d. | 113, 291 |
| HP1374 | ATP-dependent protease ATPase | 28/28 | 0/211 | 114, 292 |
| | subunit (clpX) | | | |
| HP1393 | DNA repair protein (recN) | 28/28 | 4/209 | 115, 293 |
| HP1448 | ribonuclease P, protein | 19/28 | 5/124^{#} | 116, 294 |
| | component (rnpA) | | | |
| HP1453 | conserved hypothetical protein | 28/28 | 8/200 | 117, 295 |
| HP1454 | hypothetical protein | n.d. | n.d. | 118, 296 |
| HP1460 | DNA polymerase III alpha- | 28/28 | 2/225 | 119, 297 |
| | subunit (dnaE) | | | |
| HP1497 | peptidyl-tRNA hydrolase (pth) | 28/28 | 4/155 | 120, 298 |
| HP1527 | hypothetical protein | 28/28 | 14/202 | 121, 299 |
| HP1564 | outer membrane protein | n.d. | n.d. | 122, 300 |
| HP1565 | penicillin-binding protein 2 | 28/28 | 3/178 | 123, 301 |
| | (pbp2) | | | |
| HP1574 | riboflavin synthase alpha | 23/28 | 4/153^{#} | 124, 302 |
| | subunit (ribC) | | | |
| ARF0044 | Hypothetical protein | n.d. | n.d. | 125, 303 |
| ARF0048 | Hypothetical protein | n.d. | n.d. | 126, 304 |
| ARF0143 | Hypothetical protein | n.d. | n.d. | 127, 305 |
| ARF0184 | Hypothetical protein | n.d. | n.d. | 128, 306 |
| ARF0219 | Hypothetical protein | n.d. | n.d. | 129, 307 |
| ARF0308 | Hypothetical protein | n.d. | n.d. | 130, 308 |
| ARF0349 | Hypothetical protein | n.d. | n.d. | 131, 309 |
| ARF0387 | Hypothetical protein | n.d. | n.d. | 132, 310 |
| ARF0402 | Hypothetical protein | n.d. | n.d. | 133, 311 |
| ARF0501 | Hypothetical protein | n.d. | n.d. | 134, 312 |
| ARF0509 | Hypothetical protein | n.d. | n.d. | 135, 313 |
| ARF0522 | Hypothetical protein | n.d. | n.d. | 136, 314 |
| ARF0578 | Hypothetical protein | n.d. | n.d. | 137, 315 |
| ARF0629 | Hypothetical protein | n.d. | n.d. | 138, 316 |
| ARF0665 | Hypothetical protein | n.d. | n.d. | 139, 317 |
| ARF0693 | Hypothetical protein | n.d. | n.d. | 140, 318 |
| ARF0752 | Hypothetical protein | n.d. | n.d. | 141, 319 |
| ARF0788 | Hypothetical protein | n.d. | n.d. | 142, 320 |
| ARF0819 | Hypothetical protein | n.d. | n.d. | 143, 321 |
| ARF0839 | Hypothetical protein | n.d. | n.d. | 144, 322 |
| ARF0868 | Hypothetical protein | n.d. | n.d. | 145, 323 |
| ARF0948 | Hypothetical protein | n.d. | n.d. | 146, 324 |
| ARF0969 | Hypothetical protein | n.d. | n.d. | 147, 325 |
| ARF1100 | Hypothetical protein | n.d. | n.d. | 148, 326 |
| ARF1164 | Hypothetical protein | n.d. | n.d. | 149, 327 |
| ARF1470 | Hypothetical protein | n.d. | n.d. | 150, 328 |
| ARF1553 | Hypothetical protein | n.d. | n.d. | 151, 329 |
| CRF0017 | Hypothetical protein | n.d. | n.d. | 152, 330 |
| CRF0025 | Hypothetical protein | n.d. | n.d. | 153, 331 |
| CRF0090 | Hypothetical protein | n.d. | n.d. | 154, 332 |
| CRF0127 | Hypothetical protein | n.d. | n.d. | 155, 333 |
| CRF0169 | Hypothetical protein | n.d. | n.d. | 156, 334 |
| CRF0190 | Hypothetical protein | n.d. | n.d. | 157, 335 |
| CRF0251 | Hypothetical protein | n.d. | n.d. | 158, 336 |
| CRF0258 | Hypothetical protein | n.d. | n.d. | 159, 337 |
| CRF0354 | Hypothetical protein | n.d. | n.d. | 160, 338 |
| CRF0388 | Hypothetical protein | n.d. | n.d. | 161, 339 |
| CRF0409 | Hypothetical protein | n.d. | n.d. | 162, 340 |
| CRF0421 | Hypothetical protein | n.d. | n.d. | 163, 341 |
| CRF0480 | Hypothetical protein | n.d. | n.d. | 164, 342 |
| CRF0552 | Hypothetical protein | n.d. | n.d. | 165, 343 |
| CRF0563 | Hypothetical protein | n.d. | n.d. | 166, 344 |
| CRF0578 | Hypothetical protein | n.d. | n.d. | 167, 345 |
| CRF0626 | Hypothetical protein | n.d. | n.d. | 168, 346 |
| CRF0870 | Hypothetical protein | n.d. | n.d. | 169, 347 |
| CRF0894 | Hypothetical protein | n.d. | n.d. | 170, 348 |
| CRF0922 | Hypothetical protein | n.d. | n.d. | 171, 349 |
| CRF1012 | Hypothetical protein | n.d. | n.d. | 172, 350 |
| CRF1100 | Hypothetical protein | n.d. | n.d. | 173, 351 |
| CRF1301 | Hypothetical protein | n.d. | n.d. | 174, 352 |
| CRF1354 | Hypothetical protein | n.d. | n.d. | 175, 353 |
| CRF1422 | Hypothetical protein | n.d. | n.d. | 176, 354 |
| CRF1489 | Hypothetical protein | n.d. | n.d. | 177, 355 |
| CRF1549 | Hypothetical protein | n.d. | n.d. | 178, 356 |

[0333] TABLE 3

[chemical structure]

[chemical structure]

[chemical structure]

[chemical structure]

[chemical structure]

[chemical structure]

[chemical structure]

[chemical structure]

[chemical structure]

[chemical structure]

[chemical structure]

[chemical structure]

[chemical structure]

[chemical structure]

[chemical structure]

1-37. (canceled)

38. A hyperimmune serum-reactive antigen comprising an amino acid sequence from any of SEQ ID NOs: 179-356 or fragments thereof.

39. The hyperimmune serum-reactive antigen or fragment of claim 38, further defined as a peptide comprising an amino acid sequence described in the “predicted immunogenic aa” and/or “location of identified immunogenic region” of Table 1 or of a serum reactive epitope of Table 3.

40. The hyperimmune serum reactive antigen or fragment of claim 38, further defined as comprising an amino acid sequence of amino acids: 63-91, 95-101, 110-116, 134-148, 150-156, 158-164, 188-193, 197-209, 226-241, 247-254, 291-297, 312-319, 338-346, 351-358, 366-378, 404-410, 420-438, 448-454, 465-473, 482-488, 490-498, 503-510, 512-519, 531-543, 547-554, 568-575, 589-604, 610-631 and 239-308 of SEQ ID NO:179; 16-29, 35-47, 50-68, 70-79, 91-101, 143-149, 158-163, 185-191, 196-206, 215-224, 230-237, 244-251, 258-278, 290-311, 319-325, 338-351, 365-385, 396-429, 445-454, 458-466, 491-499, 501-521, 17-79 and 218-233 of SEQ ID NO:180; 4-10, 16-41, 46-66, 77-84, 91-97, 102-118, 125-144, 187-200, 202-214, 245-253, 255-261, 286-295, 300-330, 335-342, 350-361, 363-381, 385-392, 396-416, 435-450 and 460-470 of SEQ ID NO:181; 11-19, 27-48, 52-59, 77-82, 84-107, 118-125, 127-154, 178-183, 192-209, 215-221, 286-295, 302-313, 350-357, 402-415, 417-431, 453-463, 465-493 and 313-331 of SEQ ID NO:182; 19-26, 30-43, 47-55, 63-68, 72-80, 97-104, 107-119, 129-146, 160-175, 194-216, 231-251, 254-260 and 26-43 of SEQ ID NO:183; 7-13, 29-37, 65-81, 110-120, 123-131, 135-152, 230-249, 254-260, 284-290, 292-299, 317-326, 329-336, 403-444, 452-458, 466-477, 490-498, 510-519, 541-550, 557-566 and 533-567 of SEQ ID NO:184; 5-47, 71-77, 79-86, 89-95, 120-126, 137-144, 176-181, 184-196, 202-208, 211-232, 236-282, 301-313, 317-325, 341-347, 353-384, 394-400, 412-433, 436-443 and 59-75 of SEQ ID NO:185; 4-18, 22-38, 59-69, 106-112, 116-130, 138-149, 156-170, 175-197, 200-214, 216-223, 233-244, 255-261, 266-276, 279-286, 325-333, 342-348, 366-399, 402-420, 429-441, 1-104 and 130-147 of SEQ ID NO:186; 50-58, 69-95, 97-113, 131-136, 157-163, 170-175, 188-212, 220-226, 254-259, 265-277, 283-289, 297-308, 311-318, 347-358, 360-369, 378-401, 416-421, 440-450, 454-462, 470-476, 493-502, 506-514, 536-567, 585-590, 598-607, 613-618, 653-659 and 35-46 of SEQ ID NO:187; 16-29, 32-60, 65-87, 89-123, 128-134, 137-158, 162-173, 178-196, 210-216, 218-228 and 206-225 of SEQ ID NO:188; 10-20, 26-35, 51-64, 86-91, 94-100, 113-122, 154-160, 185-191, 193-201, 211-217, 225-230, 237-246, 251-257, 298-304, 306-312, 316-328, 340-348, 357-389, 391-397, 415-421, 449-456, 458-471, 488-495, 502-511, 24-55 and 236-341 of SEQ ID NO:189; 5-22, 41-51, 87-93, 114-122, 127-136, 150-156, 158-166, 223-233, 245-263, 291-296, 9-126 and 127-285 of SEQ ID NO:190; 30-43, 46-56, 61-70, 72-83, 85-93, 103-113, 119-125, 151-166, 179-191, 212-218, 225-231, 236-243, 262-267, 291-307, 331-344, 349-355, 366-372, 380-386, 414-422, 428-447, 459-464, 469-478, 507-519, 525-544, 563-569, 576-590, 620-626, 633-643, 654-659, 665-671, 684-707, 717-723, 725-733, 747-779, 782-801 and 347-361 of SEQ ID NO:191; 4-12, 14-26, 37-80, 107-115, 133-139, 144-150, 154-165, 173-180, 191-199, 205-211, 221-231, 237-244, 254-284, 307-340, 342-353, 360-368, 370-380, 479-493, 495-503, 509-522, 525-536, 539-547, 554-560, 565-573, 578-583, 7-23 and 465-479 of SEQ ID NO:192; 4-17, 47-55, 76-83, 85-100, 104-112, 117-123, 126-135, 142-148, 156-167, 174-182, 267-273 and 258-283 of SEQ ID NO:193; 8-32, 36-42, 65-88, 102-108, 112-140, 147-163, 170-179, 183-193 and 117-124 of SEQ ID NO:194; 12-18, 45-50, 62-77, 82-95, 99-113, 115-123, 125-147, 155-177, 187-209, 211-223, 244-253, 259-270, 278-297, 302-307, 311-318, 329-334, 350-356, 359-365, 390-400, 402-413 and 333-350 of SEQ ID NO:195; 4-13, 15-27, 30-46, 53-58, 68-74, 82-95, 115-126, 134-139, 148-153, 159-176, 182-199, 201-217, 220-225, 227-235, 237-248, 253-266, 300-315, 322-336, 390-396, 412-426, 438-445, 448-459, 477-484, 502-508, 515-527, 529-537, 553-568, 643-651, 658-667, 690-703 and 376-400 of SEQ ID NO:196; 4-10, 24-32, 38-55, 59-67, 70-77, 80-87, 89-97, 123-129, 134-151, 166-172, 178-189, 191-216, 218-235, 245-259, 271-315, 326-339, 341-360 and 73-94 of SEQ ID NO:197; 13-25, 31-38, 43-57, 79-85, 92-99, 106-112, 117-128, 130-139, 146-158, 160-175, 194-204, 211-222, 225-232, 234-242, 263-270, 278-292, 299-320, 322-333 and 240-256 of SEQ ID NO:198; 4-17, 55-63, 66-101, 109-131, 135-143, 145-151, 155-161, 164-170, 177-185, 192-198, 213-218, 223-238, 246-256, 258-268, 273-283, 309-314, 322-328 and 195-221 of SEQ ID NO:199; 13-24, 31-39, 41-50, 63-69, 90-96, 104-109, 116-141, 148-153, 161-167, 173-178, 190-209, 253-258, 265-272, 279-289, 295-312, 317-343, 355-366, 376-389, 400-407, 430-451, 453-464, 466-472, 487-493, 499-505, 523-538, 554-559, 568-579, 584-601 and 344-363 of SEQ ID NO:200; 5-22, 30-36, 53-59, 61-70, 82-92, 99-106, 120-131, 135-148, 154-167, 169-183, 187-199, 204-212, 231-247 and 111-249 of SEQ ID NO:201; 17-36, 40-66, 71-144, 148-171, 173-191, 199-214, 220-252, 265-272, 278-288, 298-333, 342-385 and 287-307 of SEQ ID NO:202; 4-16, 22-28, 30-36, 42-48, 95-116, 154-162, 164-174, 239-252, 258-263, 273-285, 306-313, 323-333, 341-357, 363-369, 372-379, 395-401, 430-436, 438-453, 464-480, 33-44, 233-258 and 349-369 of SEQ ID NO:203; 4-21, 30-37, 46-53, 59-68, 80-92, 98-104, 118-143, 150-160, 165-185, 187-200, 204-211, 224-236, 241-246, 252-258, 271-280, 288-294, 311-320, 335-341 and 191-350 of SEQ ID NO:204; 4-16, 37-59, 64-70, 79-87, 93-102, 107-127, 143-165, 172-188, 197-204, 207-218, 221-227, 242-248, 258-277, 289-296, 298-316, 332-338, 344-365, 367-373, 375-382, 400-408, 415-425, 438-446 and 235-250 of SEQ ID NO:205; 4-37, 39-66, 84-98, 101-127, 140-149, 157-163, 166-172, 175-182, 184-193, 203-208, 215-232, 234-247, 250-299, 303-345 and 183-204 of SEQ ID NO:206; 10-20, 41-61, 73-87, 112-141, 176-192, 194-201, 205-222, 230-237, 257-264, 276-282, 284-310, 312-318, 330-337, 349-357 and 304-328 of SEQ ID NO:207; 4-31, 42-103, 105-113, 121-153, 160-181, 188-196, 210-226, 231-264, 272-287, 297-304, 328-336 and 304-318 of SEQ ID NO:208; 21-43, 46-52, 54-70, 72-79, 94-107, 133-141, 160-166, 217-253, 311-317, 359-365, 374-381, 390-395, 434-440, 488-494, 497-502, 511-522, 554-563, 565-574, 577-585, 591-598, 601-606, 617-625, 633-643, 658-664, 676-682, 694-702, 710-719, 754-760, 782-788, 802-808, 916-921, 942-948, 955-964, 973-979, 992-998, 1006-1011, 1016-1023, 1030-1038, 1046-1053, 1059-1066, 1088-1098, 1119-1126, 1129-1135, 1156-1171, 1173-1181, 1202-1210, 1255-1261, 1268-1280, 1295-1310, 1312-1320, 1375-1381, 1406-1417, 1450-1471, 1478-1492, 1498-1506, 1569-1578, 1603-1608, 1611-1624, 1648-1655, 1663-1670, 1680-1698, 1702-1707, 1713-1719, 1737-1742, 1747-1753, 1762-1769, 1771-1785, 1790-1804, 1811-1818, 1830-1836, 1838-1852, 1874-1886, 1893-1899, 1902-1909, 1942-1948, 1952-1962, 1980-1986, 2001-2017, 2020-2028, 2042-2050, 2052-2068, 2074-2079, 2083-2095, 2107-2113, 2147-2155, 2177-2194, 2203-2211, 2236-2241, 2251-2258, 2267-2274, 2285-2292, 2314-2328, 2330-2340, 2358-2365, 2390-2401, 2408-2418, 2432-2453, 2463-2476, 2486-2507, 2528-2537, 2540-2548, 2552-2558, 2568-2576, 2596-2601, 2610-2622, 2629-2638, 2653-2669, 2718-2727, 2749-2767, 2777-2784, 2789-2795, 2806-2815, 2817-2824, 2835-2843, 2847-2854, 2860-2881, 511-523, 612-630 and 1790-1803 of SEQ ID NO:209; 4-54, 61-68, 72-82, 86-93, 100-108, 115-130, 147-154, 187-194, 196-207, 224-229, 236-251, 275-287 and 96-109 of SEQ ID NO:210; 31-39, 62-69, 91-101, 158-172, 175-180, 186-193, 201-208, 210-223, 243-250, 273-286, 293-299, 319-325, 343-354, 356-365, 368-384, 414-435, 471-491, 512-518, 550-556, 567-581, 584-589, 633-639, 680-692, 697-708, 716-721, 747-754, 779-786, 810-816 and 366-503 of SEQ ID NO:211; 5-20, 22-48, 57-65, 96-101, 111-122, 130-145, 154-164, 170-181, 193-199, 201-216, 224-241, 244-262, 281-323, 342-351, 359-367, 369-396, 406-416, 424-433, 450-456, 485-491, 493-499, 501-515, 517-535 and 289-305 of SEQ ID NO:212; 4-17, 22-44, 53-60, 66-83, 87-94, 101-106, 110-116, 131-137, 148-183, 189-207, 209-215, 233-242, 251-262, 264-272, 290-296, 308-327, 359-373, 375-380, 397-405, 415-420, 426-433, 444-475, 478-484, 529-536, 548-558 and 106-126 of SEQ ID NO:213; 4-38, 42-50, 58-64, 72-81, 92-118, 140-146, 157-165, 172-192, 198-204, 208-216, 227-234, 238-258, 271-278, 288-293, 311-322, 327-346, 357-370, 375-383, 395-409, 411-417, 425-432, 436-445, 109-129 and 370-380 of SEQ ID NO:214; 23-30, 36-49, 52-64, 86-94, 97-104, 121-129, 257-272, 279-286, 288-294, 307-327, 334-340, 369-375, 377-386, 406-412, 418-423, 430-438, 441-447, 459-465, 469-476, 482-488, 510-546, 550-580, 584-622, 638-645, 653-659, 675-683, 692-705, 723-731, 752-761, 788-795 and 54-72 of SEQ ID NO:215; 11-33, 36-46, 88-104, 116-126, 134-170, 189-195, 199-217, 225-250, 255-261, 266-273, 280-291, 296-313, 334-341, 343-349, 354-360, 362-369, 373-380, 387-401, 406-420 and 259-273 of SEQ ID NO:216; 9-14, 28-44, 57-64, 72-79, 86-93, 104-111, 116-126, 142-150, 159-164 and 61-86 of SEQ ID NO:217; 10-17, 26-33, 43-61, 69-95, 101-107, 109-125, 129-135, 137-144, 147-153, 158-169, 177-187, 209-219, 221-232, 235-247, 261-268, 271-282, 296-302, 306-347, 355-362, 364-379, 386-399, 409-418, 424-442, 451-460, 467-479, 490-498 and 60-74 of SEQ ID NO:218; 8-14, 20-31, 65-84, 94-99, 154-179, 193-207, 238-253 and 96-118 of SEQ ID NO:219; 4-24, 30-44, 47-62, 84-93, 108-116, 124-133, 136-141, 201-209, 217-223, 228-235, 238-245, 247-270, 275-285, 290-314, 328-338, 342-349, 353-365, 375-383, 386-392, 394-402, 417-427, 443-459, 465-481, 492-514, 516-524, 550-566, 602-617, 630-639, 666-676, 687-693, 719-730, 747-753, 783-790, 799-816, 824-831, 837-842 and 167-189 of SEQ ID NO:220; 6-15, 18-28, 58-66, 84-101, 106-129, 136-151, 154-165, 182-203, 205-211, 214-220, 222-228, 233-240, 251-260, 270-277, 284-291, 306-315, 322-328, 363-369, 378-388, 392-405, 443-452, 495-501, 512-523, 574-583 and 362-375 of SEQ ID NO:221; 5-25, 27-34, 47-59, 64-70, 76-86, 145-158, 166-183, 189-202, 217-231, 235-242, 260-270, 278-309 and 1-102 of SEQ ID NO:222; 4-19, 24-76, 78-83, 90-99, 102-109, 114-122, 137-147, 154-174, 177-188, 203-212, 217-223, 227-239 and 226-325 of SEQ ID NO:223; 7-37, 71-90, 94-109, 117-128, 141-153, 179-192, 199-206, 225-231, 237-243, 258-264 and 40-51 of SEQ ID NO:224; 13-19, 25-30, 46-59, 75-91, 101-107, 114-124, 129-135, 137-145, 160-167, 171-179, 187-194, 209-215, 217-222, 229-239, 243-249, 257-265, 269-275, 299-308, 310-327 and 282-300 of SEQ ID NO:225; 86-100, 216-230, 342-369, 382-388, 424-430, 438-445, 452-458, 488-494, 501-518, 554-560, 568-574, 584-592, 603-609, 611-629, 639-645, 652-661, 669-699, 708-714, 726-738, 747-753, 763-775, 785-791, 794-807, 815-824, 826-845, 854-860, 863-868, 870-883, 892-898, 901-906, 909-921, 930-937, 946-959, 968-974, 977-990, 998-1007, 1009-1027, 1037-1043, 1046-1051, 1053-1066, 1075-1081, 1084-1089, 1092-1103, 1113-1119, 1122-1135, 1143-1152, 1154-1172, 1182-1188, 1191-1196, 1200-1210, 1220-1226, 1229-1235, 1237-1249, 1259-1265, 1268-1281, 1289-1298, 1305-1318, 1328-1334, 1337-1343, 1345-1357, 1367-1373, 1390-1396, 1405-1411, 1418-1423, 1426-1435, 1445-1455, 1474-1483, 1493-1500, 1505-1512, 1517-1524, 1538-1544, 1568-1578, 1595-1601, 1674-1682, 1687-1720, 1728-1736, 1738-1744, 1754-1761, 1764-1774, 1798-1824, 1836-1842, 1886-1893, 1895-1903, 366-781, 782-1518 and 1731-1747 of SEQ ID NO:226; 4-17, 20-39, 46-55, 60-66, 102-110, 114-122, 125-131, 161-167, 172-178, 185-190, 195-202, 218-232, 236-252, 264-291, 293-302, 309-315, 324-339 and 169-381 of SEQ ID NO:227; 5-10, 13-40, 42-53, 69-75, 83-89, 120-135, 150-161, 174-190, 203-225, 229-247, 257-287, 318-348 and 30-200 of SEQ ID NO:228; 7-19, 43-53, 64-72, 124-139, 52-84 and 120-131 of SEQ ID NO:229; 12-19, 39-48, 58-100, 117-123, 154-162, 164-187, 189-195, 202-216, 218-235, 241-246, 262-278, 315-328, 333-347, 354-366, 372-379, 391-405, 422-429, 431-442, 444-450, 458-466, 478-485, 494-501, 504-510, 520-535, 573-580, 589-598, 615-625, 666-676, 686-698, 722-729, 737-746, 756-767, 787-796, 805-816, 824-829, 833-848, 856-864, 866-876, 879-886, 898-904, 918-924, 927-934, 941-960, 967-978 and 561-575 of SEQ ID NO:230; 11-29, 49-55, 70-77, 84-100, 102-112, 148-155, 160-177, 181-204 and 1-104 of SEQ ID NO:231; 27-44, 64-71, 122-133, 151-156, 164-178, 214-220, 226-232, 235-244, 253-262, 282-288, 294-310, 317-325, 350-356, 362-368, 376-383, 438-443, 449-454, 459-464, 492-498, 500-511, 529-535, 538-546, 567-573, 597-603, 660-665, 674-679, 724-734, 763-769, 773-784, 791-801, 807-815, 821-826, 840-848, 863-868, 897-902, 908-928, 932-953, 956-975, 980-987, 990-996, 1012-1018, 1042-1063, 1095-1116, 1149-1157, 1160-1167, 110-357, 358-501 and 502-1161 of SEQ ID NO:232; 4-21, 64-71, 73-84, 128-138, 144-162, 203-217, 240-263, 288-298, 300-308, 310-317, 325-351, 369-380, 391-411 and 330-345 of SEQ ID NO:233; 5-11, 25-31, 39-48, 51-79, 89-98, 100-122, 135-148, 166-201, 203-227, 230-250, 254-260, 266-272, 274-282, 299-305, 328-337 and 31-45 of SEQ ID NO:234; 12-23, 29-48, 51-60, 66-72, 75-81, 83-93, 103-115, 133-148, 168-174, 195-204, 222-229, 231-240, 242-251, 270-280, 286-305, 322-344, 349-360, 364-370, 378-400, 421-441, 448-484, 486-493, 495-501, 504-534, 547-561, 567-590, 597-607, 621-635, 643-649, 658-685, 688-694, 702-711, 717-731, 737-742, 759-765, 767-772, 776-786, 803-809, 815-825, 854-908, 910-919, 923-930, 942-948, 961-975, 994-1014 and 915-940 of SEQ ID NO:235; 4-9, 32-47, 51-61, 75-96, 139-191 and 1-124 of SEQ ID NO:236; 4-13, 17-38, 43-49, 55-76, 88-95, 110-121, 128-146, 151-157, 162-214, 222-240, 243-249, 251-273, 275-281, 292-298, 300-309, 312-320, 322-331, 355-369, 376-408, 446-460, 471-482, 485-509 and 191-203 of SEQ ID NO:237; 4-21, 72-82, 89-103, 106-115, 118-124, 140-146, 174-184, 191-200, 204-213, 218-224, 261-266, 282-293, 299-309, 311-340, 342-358, 362-372, 381-389, 391-402, 413-421, 438-447, 457-464, 470-478, 501-507, 545-560, 578-624, 631-641, 658-670, 680-689, 717-738, 753-759, 795-805, 816-822, 830-838, 842-848, 869-881, 892-898, 33-51 and 818-835 of SEQ ID NO:238; 4-21, 79-85, 156-177, 183-188, 206-214, 243-249, 261-269, 287-292, 315-322, 334-345, 360-366, 374-390, 402-411, 37-97 and 260-399 of SEQ ID NO:239; 4-9, 19-54, 58-78, 97-104, 111-120, 126-134, 137-145, 163-173, 178-188, 193-203, 211-224, 246-286, 288-324, 337-346, 355-362, 374-390, 392-398, 409-417 and 240-249 of SEQ ID NO:240; 5-12, 14-31, 35-41, 43-61, 82-92, 97-105, 134-145, 155-166, 184-203, 215-223, 225-251, 272-279, 281-306, 310-345, 358-418, 435-473, 482-490, 525-532, 538-547, 549-563, 578-604, 613-639 and 144-154 of SEQ ID NO:241; 53-59, 64-72, 74-100, 133-152, 154-172, 176-181, 207-214, 225-238, 275-297, 304-310, 331-340, 362-367, 384-395, 403-410, 437-443, 448-456, 482-490, 579-597, 602-610, 625-630, 633-651, 699-707, 709-715, 734-743, 750-762 and 544-685 of SEQ ID NO:242; 12-18, 22-40, 45-83, 89-97, 103-109, 147-153, 159-173, 195-204, 210-219, 243-253, 259-265, 273-282, 303-309, 315-325, 332-340, 346-358, 362-367, 377-390, 393-402, 418-426, 447-455, 467-480, 505-512, 514-525, 548-561, 566-576, 584-596, 619-626, 638-645, 649-659, 661-680, 699-708, 714-720, 753-759, 766-772, 775-781, 801-808, 202-218, 282-299, 339-350 and 617-628 of SEQ ID NO:243; 5-33, 52-62, 87-101, 111-135, 137-143, 145-152, 190-202, 209-221, 233-245, 253-270 and 151-215 of SEQ ID NO:244; 19-29, 32-39, 42-48, 75-94, 124-135, 137-145, 152-160, 176-182, 193-203, 215-236, 266-273, 275-291, 297-306, 311-319, 322-342, 348-360, 369-378, 394-401 and 48-64 of SEQ ID NO:245; 4-11, 13-33, 36-43, 53-63, 65-80, 112-129, 134-141, 143-155, 157-168, 178-188, 191-199, 201-207, 215-229, 242-255, 263-270, 283-315, 320-329, 333-338, 340-349, 412-426, 465-478, 485-490, 498-512, 540-554 and 390-516 of SEQ ID NO:246; 4-18, 23-32, 41-47, 54-70, 88-99, 104-111, 118-138, 143-148, 150-162, 168-175, 181-188, 203-211, 214-220, 227-245, 251-268, 275-281, 287-296, 323-333 and 1-90 of SEQ ID NO:247; 8-34, 38-49, 72-83, 85-91, 94-104, 112-125, 134-142, 148-168, 181-189, 191-198, 202-214, 222-233, 242-254, 256-262, 273-278, 287-294, 314-325 and 141-159 of SEQ ID NO:248; 4-24, 30-36, 47-75, 82-105, 124-134, 151-157, 192-202, 208-214, 219-226, 234-247, 285-290, 318-324, 332-340, 343-349, 380-386, 453-462, 472-478, 484-501, 531-540, 550-557, 604-612, 620-625, 642-648, 652-671, 64-84, 93-180 and 181-446 of SEQ ID NO:249; 12-18, 24-32, 68-75, 77-83, 96-101, 109-116, 129-136, 152-164, 175-184, 190-199, 206-215, 224-233, 241-250, 258-264, 273-292, 302-312, 319-331, 334-346, 348-368, 387-395, 408-416, 420-429, 437-452 and 364-374 of SEQ if D NO:250; 11-28, 36-52, 60-67, 74-79, 108-116 and 61-76 of SEQ ID NO:251; 20-27, 38-49, 69-74, 84-107, 138-145, 161-168, 179-195, 210-226, 228-252, 267-281, 283-296, 305-311, 333-340, 342-356, 361-372, 380-399, 401-414, 458-466, 475-481, 492-507, 515-520 and 146-160 of SEQ ID NO:252; 43-61, 68-74, 76-90, 120-128, 130-149, 156-161, 164-182, 206-234, 242-252, 269-274, 291-304, 332-345, 349-355, 360-371, 374-388, 434-440, 447-453, 459-465, 469-496, 504-522 and 261-285 of SEQ ID NO:253; 4-17, 24-30, 37-49, 87-98, 118-124, 126-136, 144-171, 176-188, 206-214, 216-228, 233-240, 246-252, 262-271, 277-297, 307-330, 333-342, 346-352, 355-361, 368-386, 391-400, 413-420, 474-480 and 401-427 of SEQ ID NO:254; 15-26, 31-46, 51-72, 80-93, 96-109, 131-137, 150-158, 179-185, 189-209, 211-219, 221-234, 241-247, 255-262, 265-271, 283-288 and 173-190 of SEQ ID NO:255; 28-37, 39-45, 51-58, 77-84, 89-97, 132-148, 171-180, 199-205, 212-218, 220-226, 257-265, 273-300, 307-327, 334-340, 344-365, 385-390, 402-408, 426-436, 450-468, 476-485 and 425-497 of SEQ ID NO:256; 4-25, 70-76, 80-88, 90-100, 120-128, 162-169, 183-203, 261-277, 279-289, 291-297, 302-308, 321-327, 339-353, 358-377, 392-401, 404-410, 414-422, 443-450, 456-461, 470-488, 490-497, 510-535, 570-611, 618-630, 639-647, 649-660, 668-690, 702-716, 718-724, 737-747, 750-764 and 497-509 of SEQ ID NO:257; 12-48, 50-64, 99-108, 216-223, 235-241, 244-254, 262-274, 287-293, 310-316, 320-326, 361-366, 377-383, 390-395, 408-414, 418-425, 438-444, 462-469, 494-505, 524-530, 536-547, 551-566, 592-598, 601-613, 678-685, 687-695, 709-717, 727-737, 751-757, 760-765, 772-778, 782-788, 801-807, 822-830, 859-868, 870-878, 884-890, 898-903, 909-919, 953-969, 973-980, 990-1000, 1002-1019, 1041-1047, 1059-1065, 1090-1095, 1116-1127, 1130-1139, 1143-1149, 1151-1168, 1178-1183, 1188-1195, 1197-1209, 1213-1220, 1226-1234, 1236-1247, 1255-1274, 1276-1282, 76-100, 270-284, 309-438, 493-505, 786-942 and 947-967 of SEQ ID NO:258; 4-9, 24-34, 46-95, 97-109, 119-130 and 138-156 of SEQ ID NO:259; 9-26, 28-35, 43-53, 55-68, 83-92, 99-105, 110-135, 139-149, 157-162, 164-170, 173-183, 193-208, 210-230, 239-245, 253-259, 263-271, 293-305, 310-320, 322-331, 336-343, 351-364, 367-376, 92-107 and 154-173 of SEQ ID NO:260; 19-39, 52-62, 108-117, 145-152, 160-168, 194-203, 229-240, 252-268, 280-287, 308-316, 333-339, 383-390, 403-412, 414-424, 438-445, 464-472, 479-484, 489-505, 510-526 and 247-260 of SEQ ID NO:261; 5-17, 25-52, 60-77, 105-113, 118-125, 162-167, 228-234, 272-279, 328-334, 341-357, 381-395, 400-406, 512-518, 557-569, 586-592, 645-651, 690-695, 701-709, 720-726, 733-743, 751-758, 781-786, 879-886, 929-934, 939-944, 952-960, 965-975, 994-1001, 1039-1045, 1102-1109, 1164-1181, 1198-1206, 1223-1229, 1253-1259, 1283-1292, 1312-1317, 1339-1349, 1360-1370, 1389-1398, 1400-1412, 1452-1465, 1470-1484, 1490-1497, 1519-1525, 1554-1564, 1578-1591, 1623-1636, 1638-1646, 1669-1679, 1685-1697, 1704-1711, 1713-1720, 1730-1736, 1738-1749, 1756-1764, 1778-1786, 1796-1803, 1817-1826, 1849-1866, 1975-1993, 2017-2032, 2044-2053, 2070-2086, 2091-2109, 2116-2127, 2156-2167, 2182-2188, 2197-2202, 2244-2252, 2281-2287, 2290-2307, 2350-2361, 2383-2404, 2425-2433, 2445-2455, 2495-2505 and 394-549 of SEQ ID NO:262; 9-24, 31-53, 57-67, 69-79, 84-114, 133-141, 144-172, 178-186 and 13-46 of SEQ ID NO:263; 4-25, 27-35, 43-52, 59-70, 79-91, 115-130, 136-152, 154-163, 170-179 and 1-58 of SEQ ID NO:264; 4-30, 49-55, 71-80, 96-105, 111-126, 139-146, 149-162, 239-245, 279-285, 290-296, 300-307, 331-337, 343-350 and 250-351 of SEQ ID NO:265; 9-27, 34-41, 43-51, 92-111, 114-120, 123-131, 139-150, 156-171, 176-186, 188-204, 229-241, 252-258, 266-279, 288-297, 319-334, 338-348, 373-379, 389-398, 431-439, 479-484 and 214-398 of SEQ ID NO:266; 4-15, 18-27, 47-52, 68-83, 91-97, 104-110, 115-121, 139-147, 157-164, 198-206, 227-236, 241-254, 264-273, 278-289, 311-320, 353-361, 372-383, 405-420, 426-434 and 232-386 of SEQ ID NO:267; 4-10, 24-34, 91-97, 129-141, 156-163, 184-190, 205-219, 229-235, 256-273, 278-285 and 93-116 of SEQ ID NO:268; 7-29, 35-54, 71-83, 85-91, 104-111, 122-134, 138-144, 146-154, 158-174, 177-183, 186-201, 207-215, 223-235, 240-247, 262-273, 275-283, 287-292 and 48-66 of SEQ ID NO:269; 7-27, 31-47, 49-70, 75-102, 110-149, 157-171, 217-223, 235-251, 294-302, 358-364, 367-375, 387-393, 395-412, 423-430, 441-451, 456-470, 472-486, 488-495, 499-509, 515-529, 536-549, 556-570, 574-603, 607-615, 625-633, 642-658, 670-676, 683-702, 708-716, 720-726, 747-756, 763-784, 803-812, 815-826 and 475-490 of SEQ ID NO:270; 7-22, 30-38, 53-59, 64-75, 83-95, 97-112, 120-131, 133-142, 145-151, 154-166, 172-180, 189-203, 227-238, 277-287, 9-156 and 174-287 of SEQ ID NO:271; 13-23, 25-32, 111-117, 150-164, 185-193, 207-212, 216-224, 230-236, 263-272, 304-311, 342-348, 374-385, 391-407, 444-458, 480-487, 489-499, 523-542, 544-558, 572-579, 620-640, 686-696, 703-710, 742-755, 765-772, 817-822, 830-837, 865-872, 931-937 and 66-86 of SEQ ID NO:272; 4-27, 49-56, 62-70, 86-92, 121-127, 151-163, 170-182, 195-202, 212-226, 237-243 and 234-254 of SEQ ID NO:273; 4-10, 13-24, 39-51, 62-78, 92-104, 107-117, 134-141, 156-161, 166-181, 210-216, 222-229, 256-266, 273-280, 297-304, 313-330, 336-349, 371-376, 433-439, 443-448, 488-493, 506-515, 527-534, 560-572, 575-583, 587-593 and 252-483 of SEQ ID NO:274; 4-15, 21-38, 45-56, 81-95, 102-108, 118-130, 133-147, 152-162, 166-171, 199-204, 211-218, 230-240, 253-261, 274-283, 288-294, 312-317, 325-336, 344-357, 391-414 and 24-146 of SEQ ID NO:275; 26-31, 38-56, 65-82, 90-101, 112-119, 123-153, 175-188, 197-216, 234-242, 249-265, 273-286, 290-305, 327-335, 338-346, 361-372, 394-404 and 290-306 of SEQ ID NO:276; 17-26, 43-48, 50-73, 81-93, 95-107, 139-146, 158-168, 171-176, 190-196, 202-212, 216-223, 243-266, 274-282, 308-313, 324-330, 344-378, 380-387, 403-422, 427-443, 448-455, 457-465, 491-515, 517-528, 553-567, 589-599, 610-617, 642-648, 670-697, 709-717, 726-743, 745-759, 769-803, 807-823, 840-849 and 820-851 of SEQ ID NO:277; 4-18, 39-48, 53-63, 66-90, 102-117, 125-134, 137-145, 156-162, 169-197, 26-40 and 56-80 of SEQ ID NO:278; 21-33, 36-42, 49-60, 68-76, 91-105, 123-130, 141-161, 169-178, 185-190, 192-199, 205-214, 223-233, 239-247, 260-269, 284-293, 300-314, 324-352, 357-364, 373-382, 389-403, 420-432, 438-446, 466-471, 477-484, 503-509, 549-556, 558-576, 600-623, 625-635, 654-661, 663-669, 671-687, 702-716, 735-741, 744-750, 757-766, 776-786, 807-815, 824-832, 854-860, 863-897, 909-915, 920-946, 952-959, 982-997, 1024-1038, 1049-1055, 1071-1085, 1104-1113, 1121-1132, 1138-1150, 1187-1196, 1212-1221, 1227-1236, 1257-1262, 1264-1278, 1282-1294, 1307-1318, 1353-1370, 1382-1388, 1396-1409, 1434-1440, 1446-1454, 1465-1478, 1485-1513, 1516-1529, 1540-1545, 1563-1568, 1575-1593, 1607-1616, 1628-1645, 1648-1661, 1676-1682, 1689-1697, 1713-1719, 1739-1749, 1753-1758, 1763-1774, 1797-1803, 1807-1846, 1855-1874, 1877-1891, 1893-1907, 1912-1925, 1931-1943, 1955-1965, 1976-1990, 2032-2043, 2045-2051, 2099-2105, 2131-2138, 2161-2179, 2188-2199, 2205-2216, 2219-2227, 2235-2245, 2247-2267, 2277-2288, 2294-2304, 2314-2326, 2346-2358, 2365-2377, 2383-2402, 2407-2423, 2437-2450, 2454-2473, 2489-2497, 2525-2531, 2557-2570, 2580-2587, 2589-2599, 2621-2641, 2647-2653, 2661-2677, 2685-2690, 2697-2717, 2722-2733, 2739-2777, 2786-2793, 2801-2808, 2811-2822, 2825-2835, 2838-2845, 2859-2871, 2877-2883, 213-344, 954-1080 and 2524-2733 of SEQ ID NO:279; 10-16, 18-23, 28-41, 63-69, 77-91, 101-109, 118-136, 146-153, 155-162, 168-179, 192-207, 217-226, 229-235, 239-254, 279-286, 294-307, 313-319, 334-341, 344-353, 363-377, 390-396 and 178-328 of SEQ ID NO:280; 18-42, 68-84, 89-95, 100-105, 107-115, 125-135, 154-177, 189-195, 205-228, 236-243, 252-259, 279-300, 309-316, 323-331, 340-351, 353-364, 377-402 and 85-97 of SEQ ID NO:281; 4-18, 26-32, 66-76, 100-126, 151-159, 178-186, 188-194, 200-210, 241-248, 253-259, 262-279, 284-291, 307-313, 315-322, 327-337, 376-386, 399-407, 432-441, 467-473, 487-497, 499-505, 543-549, 560-568, 585-593, 598-604, 608-614, 630-642, 647-653, 690-703, 717-730, 21-200 and 468-480 of SEQ ID NO:282; 17-49, 52-58, 62-73, 78-97, 100-117, 122-172, 185-190, 193-217, 225-236 and 33-42 of SEQ ID NO:283; 7-39, 50-58, 73-89, 96-107, 109-120, 126-142, 152-170, 178-202, 205-211, 224-244, 249-259, 261-270, 300-310, 312-325 and 158-169 of SEQ ID NO:284; 4-31, 40-64, 71-82, 85-92, 102-124, 126-139, 147-152, 159-173, 176-188, 195-207, 210-216, 234-241, 249-256, 258-276, 279-293, 296-302, 310-315, 349-356, 363-378, 380-403, 411-426, 435-441, 448-459, 463-476, 488-494 and 201-221 of SEQ ID NO:285; 5-13, 15-74, 87-104, 107-120, 123-129, 136-145, 150-191, 193-206, 227-248, 250-264, 278-302, 304-323, 332-378, 384-407, 409-419, 425-457, 462-471, 474-497, 511-545, 555-564, 571-578, 585-598, 640-647, 669-675, 682-691, 693-705, 729-743, 752-761, 772-780, 786-804, 808-818, 822-846, 858-880, 884-900, 910-939, 941-947, 962-971, 973-988, 998-1003, 1007-1027 and 236-259 of SEQ ID NO:286; 4-19, 27-68, 81-111, 121-160 and 60-79 of SEQ ID NO:287; 4-37, 40-46, 52-57, 199-205, 222-229, 236-244, 250-267, 269-282 and 27-197 of SEQ ID NO:288; 4-16, 24-30, 32-38, 63-75, 86-92, 98-111, 113-126, 160-165, 170-180, 198-204, 227-233, 239-245, 253-273, 308-314, 352-365, 382-387, 395-403, 423-429, 472-482, 484-493, 501-507, 518-526, 536-541, 543-550, 556-562, 586-600, 626-633, 649-661, 680-688 and 546-559 of SEQ ID NO:289; 16-33, 48-59, 63-71, 77-92, 94-109, 117-124, 139-151, 169-181, 184-227, 233-249, 251-261, 263-275, 282-294, 297-321, 326-332, 341-355, 383-399 and 258-272 of SEQ ID NO:290; 11-26, 31-39, 43-52, 55-62, 64-70, 80-94, 123-133, 135-141, 172-181, 185-206, 209-218, 224-230, 238-244, 251-262, 264-271, 290-301, 306-324, 333-340, 350-357, 367-375, 390-397, 434-441, 443-448, 77-226 and 350-429 of SEQ ID NO:291; 4-13, 22-27, 31-45, 50-59, 72-96, 99-114, 131-141, 143-150, 159-176, 180-186, 189-198, 208-214, 234-253, 271-287, 294-299, 310-366, 382-390, 398-416, 424-443 and 283-305 of SEQ ID NO:292; 9-26, 30-53, 62-72, 86-95, 112-122, 136-145, 153-160, 209-221, 227-237, 241-268, 281-288, 291-298, 308-314, 321-328, 336-346, 351-379, 388-397, 409-416, 423-433, 443-481, 511-519 and 213-232 of SEQ ID NO:293; 12-18, 25-31, 38-50, 59-67, 71-82, 96-126 and 76-88 of SEQ ED NO:294; 4-25, 39-44, 64-71, 74-88, 100-113, 128-138, 151-162, 164-177, 185-190, 204-213, 233-239, 246-254, 281-286, 293-306, 309-318, 333-347, 349-359, 385-398, 404-423, 458-465, 477-484, 490-499, 501-533, 554-566, 582-590, 596-616, 624-629, 631-639, 654-680, 694-720, 735-743 and 2-100 of SEQ ID NO:295; 4-16, 36-41, 52-75, 98-107, 109-117, 122-128, 133-139, 141-155, 159-165, 169-182, 187-193, 195-201, 211-224, 230-236, 247-269, 278-290 and 75-92 of SEQ ID NO:296; 7-21, 25-33, 37-43, 87-94, 103-120, 131-147, 168-174, 197-203, 207-212, 227-237, 247-257, 263-271, 279-287, 298-306, 320-325, 332-340, 363-374, 379-384, 390-401, 403-414, 428-433, 448-457, 462-475, 483-490, 513-519, 525-535, 543-554, 559-566, 571-620, 625-631, 636-642, 659-670, 688-706, 708-723, 770-779, 787-793, 796-807, 820-840, 848-854, 863-874, 895-905, 912-919, 934-942, 968-975, 983-1000, 1012-1019, 1026-1036, 1050-1060, 1064-1070, 1081-1091, 1094-1108, 1112-1118, 1140-1152, 1164-1169, 1172-1180, 1187-1192 and 732-748 of SEQ ID NO:297; 23-40, 42-59, 66-73, 78-97, 111-128, 130-141, 157-166, 178-183 and 53-71 of SEQ ID NO:298; 4-27, 38-44, 47-57, 59-85, 99-106, 114-121, 154-166, 181-186, 193-198, 238-244, 253-262, 272-278, 287-299, 314-320, 338-350, 358-368, 382-388, 407-416, 433-446, 456-461, 463-473 and 86-195 of SEQ ID NO:299; 5-24, 38-59, 64-80, 87-99, 105-126, 134-142, 149-163, 165-179, 181-202, 205-220, 227-233, 243-250, 257-263 and 87-245 of SEQ ID NO:300; 5-32, 47-53, 66-79, 81-97, 115-151, 155-174, 183-188, 196-210, 215-226, 230-238, 253-258, 263-270, 276-282, 295-301, 304-325, 334-344, 360-390, 397-412, 425-432, 434-462, 478-494, 508-526, 539-564, 571-579, 347-371 and 375-386 of SEQ ID NO:301; 4-15, 36-44, 49-56, 60-66, 68-82, 84-103, 109-115, 118-141, 147-154, 160-168, 176-185 and 26-39 of SEQ ID NO:302; 7-13, 23-33 and 13-21 of SEQ ID NO:303; 2-10 of SEQ ID NO:304; 4-9, 12-18, 35-42, 49-62 and 6-18 of SEQ ID NO:305; 19-25 and 1-13 of SEQ ID NO:306; 15-21, 27-45 and 12-25 of SEQ ID NO:307; 14-20 and 1-14 of SEQ ID NO:308; 4-18 and 13-26 of SEQ ID NO:309; 8-21 and 2-20 of SEQ ID NO:310; 4-14 and 4-16 of SEQ ID NO:311; 3-12 of SEQ ID NO:312; 6-14, 6-25, 35-57 and 2-14 of SEQ ID NO:313; 6-25, 35-57 and 17-31 of SEQ ID NO:314; 14-25, 32-46 and 5-19 of SEQ ID NO:315; 18-31 and 5-16 of SEQ ID NO:316; 19-24 and 4-26 of SEQ ID NO:317; 13-21, 29-34, 47-58, 61-73 and 36-47 of SEQ ID NO:318; 4-15 and 5-24 of SEQ ID NO:319; 6-18 of SEQ ID NO:320; 13-20 and 4-13 of SEQ ID NO:321; 15-23 of SEQ ID NO:322; 4-9 and 7-21 of SEQ ID NO:323; 1-10 of SEQ ID NO:324; 4-14 of SEQ ID NO:325; 4-17, 35-41, 46-89, 93-98 and 70-88 of SEQ ID NO:326; 1-13 of SEQ ID NO:327; 4-16, 26-32 and 25-38 of SEQ ID NO:328; 8-15, 23-28 and 4-17 of SEQ ID NO:329; 4-12 and 1-15 of SEQ ID NO:330; 4-29, 31-42, 52-58 and 6-16 of SEQ ID NO:331; 4-9, 24-32 and 9-19 of SEQ ID NO:332; 4-12, 18-27 and 5-18 of SEQ ID NO:333; 4-11, 37-56, 58-92 and 18-29 of SEQ ID NO:334; 8-28 and 20-35 of SEQ ID NO:335; 4-15 of SEQ ID NO:336; 4-23, 27-39, 55-63 and 35-58 of SEQ ID NO:337; 6-26, 28-54 and 28-47 of SEQ ID NO:338; 4-10, 38-52, 58-82 and 30-49 of SEQ ID NO:339; 4-22, 29-35, 44-50, 53-68, 70-80 and 20-33 of SEQ ID NO:340; 22-28, 30-36 and 18-33 of SEQ ID NO:341; 4-11, 13-21, 25-30 and 20-30 of SEQ ID NO:342; 10-22 and 10-23 of SEQ ID NO:343; 4-11 and 9-20 of SEQ ID NO:344; 14-25, 32-46 and 6-19 of SEQ ID NO:345; 5-30 and 14-33 of SEQ ID NO:346; 4-15, 28-35, 46-55, 59-65, 76-84 and 9-24 of SEQ ID NO:347; 27-33 and 5-19 of SEQ ID NO:348; 5-13 and 8-18 of SEQ ID NO:349; 9-22, 24-34 and 21-40 of SEQ ID NO:350; 4-17, 35-41, 46-89, 93-98 and 71-89 of SEQ ID NO:351; 4-12, 14-24 and 2-17 of SEQ ID NO:352; 9-17 and 5-16 of SEQ ID NO:353; 7-41, 48-58, 63-75, 80-89 and 43-53 of SEQ ID NO:354; 4-22, 25-30 and 4-14 of SEQ ID NO:355; 4-55 and 18-33 of SEQ ID NO:356; 262-280 of SEQ ID NO:179; 131-146 of SEQ ID NO:186; 207-224 of SEQ ID NO:188; 27-50, 203-217 and 313-325 of SEQ ID NO:189; 110-129 of SEQ ID NO:192; 156-179, 174-197, 192-215, 210-233, 228-251 and 246-267 of SEQ ID NO:190; 377-400 of SEQ ID NO:196; 34-43, 234-257 and 350-367 of SEQ ID NO:203; 304-327 of SEQ ID NO:207; 25-48, 43-66 and 61-82 of SEQ ID NO:222; 398-421, 416-439, 434-457, 452-475, 470-493, 488-511, 506-529, 524-547, 621-644, 639-664, 707-730, 725-748, 743-766, 761-784, 779-802, 797-820, 984-1007, 1002-1025, 1020-1043, 1038-1061, 1056-1079, 1074-1097, 1092-1115, 1286-1309, 1304-1327, 1322-1345, 1340-1363, 1358-1381, 1376-1399, 1394-1417, 1412-1435, 1430-1453, 1448-1471, 1466-1489 and 1484-1507 of SEQ ID NO:226; 188-211, 206-229, 224-247, 242-265, 260-283 and 278-296 of SEQ ID NO:227; 56-79 and 122-132 of SEQ ID NO:229; 35-46 of SEQ ID NO:231; 178-201, 196-219, 214-237, 232-255, 250-273, 268-291, 379-402, 397-420, 415-438, 433-456, 451-474, 642-665, 660-683, 678-701, 696-719, 714-737, 732-755, 750-773, 768-791, 899-922, 917-940, 935-958, 1037-1060, 1055-1078, 1073-1096 and 1091-1114 of SEQ ID NO:232; 330-346 of SEQ ID NO:233; 571-594, 589-612, 607-630, 625-648, 643-666 and 661-684 of SEQ ID NO:242; 188-207 of SEQ ID NO:244; 61-84, 308-331, 326-349, 344-367, 362-385, 380-403 and 398-421 of SEQ ID NO:249; 79-98, 345-366, 844-867, 870-887 and 890-905 of SEQ ID NO:258; 94-109 of SEQ ID NO:268; 188-207 of SEQ ID NO:272; 290-306 of SEQ ID NO:276; 826-849 of SEQ ID NO:277; 228-252, 247-270, 265-288, 283-306, 301-324, 955-978, 973-996, 991-1014, 1009-1032, 1027-1050, 1045-1068, 2533-2556, 2551-2574, 2569-2592, 2587-2610, 2605-2628 and 2623-2646 of SEQ ID NO:279; 86-109 and 104-127 of SEQ ID NO:288; 546-560 of SEQ ID NO:289; 260-271 of SEQ ID NO:290; 106-129, 124-147, 142-165, 160-183, 178-201 and 375-398 of SEQ ID NO:291; 284-307 of SEQ ID NO:292; 362-385 of SEQ ID NO:301.

41. The hyperimmune serum-reactive antigen or fragment of claim 38, comprising at least 6 contiguous amino acids of any of SEQ ID NOs: 179-356.

42. The hyperimmune serum-reactive antigen or fragment of claim 38, comprising at least 8 contiguous amino acids of any of SEQ ID NOs: 179-356.

43. The hyperimmune serum-reactive antigen or fragment of claim 38, comprising at least 10 contiguous amino acids of any of SEQ ID NOs: 179-356.

44. The hyperimmune serum-reactive antigen or fragment of claim 38, further defined as directed against H. pylori.

45. A pharmaceutical composition comprising a hyperimmune serum-reactive antigen or fragment of claim 38.

46. The pharmaceutical composition of claim 45, wherein the hyperimmune serum-reactive antigen or fragment is directed against H. pylori.

47. The pharmaceutical composition of claim 45, further defined as comprising at least two different hyperimmune serum-reactive antigens and/or fragments.

48. The pharmaceutical composition of claim 47, wherein the at least two different hyperimmune serum-reactive antigens and/or fragments are both directed against H. pylori.

49. The pharmaceutical composition of claim 45, further comprising an immunostimulatory substance.

50. The pharmaceutical composition of claim 49, wherein the immunostimulatory substance is a polycationic polymer, an immunostimulatory deoxynucleotide (ODN), a peptide containing at least two LysLeuLys motifs, a neuroactive compound, alum, or a Freund's complete or incomplete adjuvant.

51. The pharmaceutical composition of claim 50, wherein the polycationic polymer is a polycationic peptide.

52. The pharmaceutical composition of claim 50, wherein the neuroactive compound is human growth hormone.

53. The pharmaceutical composition of claim 45, further defined as a vaccine.

54. The pharmaceutical composition of claim 53, further defined as a vaccine for treatment and/or prevention of H. pylori infection.

55. A method of vaccinating a subject comprising:
obtaining a pharmaceutical composition of claim 45; and
administering the pharmaceutical composition to a subject;
wherein the subject is vaccinated.

56. The method of claim 55, wherein the subject is a human.

57. The method of claim 55, further defined as a method of treating and/or preventing H. pylori infection in the subject.

58. The method of claim 55, wherein the hyperimmune serum-reactive antigen or fragment is directed against H. pylori.

59. The method of claim 55, wherein the pharmaceutical composition comprises at least two different hyperimmune serum-reactive antigens or fragments thereof.

60. The method of claim 59, wherein the at least two different hyperimmune serum-reactive antigens or fragments thereof are both directed against H. pylori.

The application's sequence listing, which the Patent Office published only in electronic form, follows.

SEQUENCE LISTING (358 sequences)

SEQ ID NO: 1 - DNA, 1902 bp, Artificial Sequence
  Description of Artificial Sequence:  Synthetic Primer
atggtgaaaaacaccggcgaattgaaaaaactttcagacacttatgagaatttgagcaaccttttaaccaattttaacaacctcaatcaagcggtaacgaacgcgagcagcccttcagaaatcaatgccacgatcgataatttaaaagcaaacacgcaagggctgattggcgaaaaaaccaattccccggcgtatcaagcggtgtatttggcgctcaatgcggcggtggggctgtggaatgtgatagcctataatgtccaatgcggtcctggtaagagtggggatcaaagcgtaatttttgatggccaaccaggacatgattcaagatccattaattgcaatttaaccggttataacaacggggttagcggccctttatccattgacaattttaaaacgcttaatcaagcttatcaaactatccaacaagctttaaaacaagatagcggatttcctgttttggatagtaaaggaaaacaagtaactataaaaataacaacacaaactaatggagctaataaaagtgaaactactactactactactactactaatgacgctcaaacccttttgcaagaagccagtaaaatgataagcgtcctcactacaaactgcccatgggtaaataccgctcataactcaaacgggggtgcaccgtggaatttaaatacgacagggaatgtgtgtcaggtttttgccacggagtttagcgccgttactagcatgatcaaaaacgcgcaagaaatcgtaacgcaagctcaaagccttaacaacccgcaaagcaatcaaaacgcgccgaaagatttcaatccttacacctctgctgatagggctttcgctcaaaacatgctcaatcacgcgcaagcgcaagccaagatgcttgaactagccgatcaaatgaaaaaagaccttaacactatcccaaaacaatttatcacaaactacttggcagcttgccgcaatgggggtgggacattacctgatgcaggggttacttctaacacttggggggccggttgcgcctatgtggaagagacgataaccgccctaaataacagccttgcgcattttggcactcaagccgatcaaatcaagcaatctgagttgttggcgcgcacgatacttgattttagaggcagccttaaggatttaaacaacacttataacagcatcaccacgaccgcttcaaacacgcccaattccccattccttaaaaatttgataagccaatccactaaccctaataaccccgggggcttacaggccgtttatcaagtcaaccaaagcgcttattcgcaattattaagcgccacgcaagaattagggcataaccctttcagacgcgttggcttaatcagctctcaaaccaacaacggtgcgatgaatgggatcggcgtgcaaatagggtataaacaattttttggtgaaaaaagaagatgggggttaaggtattatggtttttttgattacaaccatgcttatatcaaatccagctttttcaactccgcctctgatgtgttcacttatggggtaggaacagatgtcctctataactttatcaacgataaagccaccaaaaacaataagatttcttttggggtgtttggggggattgcgttagctggcacttcgtggcttaattctcaatacgtgaatttagcgacattcaataatttttacagcgctaaaatgaatgtggcgaatttccaattcttattcaacttgggcttgagaatgaatctcgctaaaaacaaaaagaaagcgagcgatcatgtagctcagcatggcgtggaactaggcgtgaagatccctacgatcaacacgaattactattctttgctaggcactcaactccaataccgcaggctttatagcgtgtatttgaattatgtgtttgcttac

SEQ ID NO: 2 - DNA, 1638 bp, Artificial Sequence
  Description of Artificial Sequence:  Synthetic Primer
atggcaaaagaaatcaaattttcagatagcgcgagaaaccttttatttgaaggcgtgagacaactccatgacgctgttaaagtaaccatggggccaagaggcaggaacgtgttgatccaaaaaagctatggcgctccaagcatcactaaagatggcgtgagcgtggctaaagagattgaattaagttgcccggtagctaacatgggcgctcaactcgttaaagaagtagcgagcaaaaccgctgatgctgccggcgatggcacgaccacagcgaccgtgctggcttatagcatttttaaagaaggtttgaggaacatcacggctggggctaaccctattgaagtgaaacgaggcatggataaagccgctgaagccattattaatgagcttaaaaaagcgagcaaaaaagtgggcggtaaagaagaaatcacccaagtggcgaccatttctgcaaactccgatcacaatatcgggaaactcatcgctgacgctatggaaaaagtgggtaaagacggcgtgatcaccgttgaagaagctaagggcattgaagatgaactagatgttgtagaaggcatgcaatttgatagaggctacctctccccttattttgtaacaaacgctgagaaaatgaccgctcaattggataacgcttacatccttttaacggataaaaaaatctctagcatgaaagacattctcccgctactagaaaaaaccatgaaagagggcaaaccgcttttaatcatcgctgaagacattgagggcgaagctttaacgactctagtggtgaataaattaagaggcgtgttgaatatcgcagcggttaaagctccaggctttggggacagaagaaaagaaatgctcaaagacatcgctattttaaccggcggtcaagttattagcgaagaattgggcttgagtctagaaaacgctgaagtggagtttttaggcaaagccggaaggattgtgattgacaaagacaacaccacgatcgtagatggcaaaggccatagccatgatgtcaaagacagagtcgcgcaaatcaaaacccaaattgcaagcacgacaagcgattatgacaaagaaaaattgcaagaaaggttggctaaactctctggcggtgtggctgtgattaaagtgggcgctgcgagtgaagtggaaatgaaagagaaaaaagaccgggttgatgatgcgttgagcgcgactaaagcggctgttgaagaaggtattgtgattggcggcggtgcggctctcattcgcgcggctcaaaaagtgcatttgaatttgcacgatgatgaaaaagtgggctatgaaatcatcatgcgcgccattaaagccccattagctcaaatcgctatcaatgccggttatgatggcggtgtggtcgtgaatgaagtagaaaaacacgaagggcattttggttttaacgctagcaatggcaagtatgtggatatgtttaaagaaggcattattgaccccttaaaagtagaaaggatcgctttacaaaatgcggtttcggtttcaagcctgcttttaaccacagaagccaccgtgcatgaaatcaaagaagaaaaagcggccccagcaatgcctgatatgggtggcatgggcggtatgggaggcatgggtggcatgatg

SEQ ID NO: 3 - DNA, 1410 bp, Artificial Sequence
  Description of Artificial Sequence:  Synthetic Primer
atgaaaattaaaaatatcttactgagtggggggagcgggaaacgcctatggcctttaagccgtagcctataccctaagcaatttttaaagctttttgaccataaaagcttgtttgaattgagttttaaaagaaacgcttccttagtagatgaaacgctcattgtgtgcaatgaaaagcattattttttagccctagaagagataaagaatgaaatcaaaaacaaaagcgtgggttttttattagagagcttgagtaaaaacaccgctaacgccatcgctttgagcgctttaatgagcgataaagaagatttgctcatcgttacgccaagcgatcatttgattaaagaccttcaagcgtatgaaaacgcgataaaaaaagcgattgatctagcccaaaaaggttttttagtcacttttggggtgagtattgacaagcccaacacggagtttgggtatattgaaagccctaatggtttagatgtcaagcgattcattgaaaagccaagcctagacaaagcgatagagtttcaaaaaagcgggggtttttatttcaatagcggcatgtttgttttccaagcgggcgtttttttagacgaactaaaaaagcatgcccccactattttaaaggggtgtgaaagagcgtttgaatctttagaaaacgcgtatttttttgaaaaaaagatcgctcgtttgagcgaaaagagcatgcaagatttagaagacatgagtattgatatagccttaatgcaacaaagccacaaaatcaaaatggtagaattgaacgccaaatggagcgatttagggaattttaacgctctttttgaagaagcggctaacgagcctaaagaaaatgtcagcttgaatcaaacgcctgtttttgccaaagaaagcgaaaataatttagtgttttctcataaagtgagcgctcttttaggcgttgagaatttagcggttattgacactaaagacgctcttttaatcgctcataaagacaaggctaaggatttaaaagctttagtgaacgaggtagaaacaaacaaccaagaattgttgcaaacgcacactaaagtctatcgcccttgggggagttatgaagtcttgcatgagagcggttgttacaaggttaagattttagaagtcaaaccaaacgcaaggctttctttacaaaagcatttccacaggagcgaacactgggtagtgattagcgggatggcgagcgtggagttggatcaccagttgtttgaattgcaagctaatgagtccacttatatccctaaaaacaccctacaccgcctggctaattacggcaagatccctttaattatcatagaagttcaagtgggcgagtatgtcggtgaagacgatattgtgcgcattgatgatgattttaacagacaaaatcaaaacgcc

SEQ ID NO: 4 - DNA, 1488 bp, Artificial Sequence
  Description of Artificial Sequence:  Synthetic Primer
atggctgaatggaaaacggatacagaagaagtcaaagaggttgttaaaaaatgcagggaatttaaaagatccttacaagaagaaaaatgcagtccatttatcaaagaccttgatagttacgcgctaaaaatcatagtggagcgcagaaaaattgaacaccaattgcaagaagctatagaaaaattaagaagagccaaaaaaaagagaagtagcttttggggatcctttgtagagggtgcgagagatcttcttgatatggtcagggagattatcccacctgctaaattgggtgctgaagcttgtgataaggttttaaatcttatggaagacaatatagaaaaatgggaacacaatgtaaggttattagaacgaatgcttgaaatctacgccactcaagccaaagcgagcgcggaacttgtagagggagcttggaagagcgttaaaaagtcgttggacttttataccgataagcaccaggaatttatcaaacgcttgaactatgcgagtgaagcgatagacaacgaatacaatatcgcgcccccagaaattttgaacgagagcgattttgaaagccctacgattgtttataaccctaaaaaaagcgtttatgatgaacacttgaaagatttgagggaagattttagcttttctttatacgctgatttgaaaaacagaattaacgcttcttctaagctagatcgcaccacaacctctaaagagcaagaatttgaaaagaatttagaggatttgatgccaggctttagaggtggaactgacactttgtctggcgatgaattagagcacatggcaagctttagagggcaagaatttgaaaagaatttagaggatttgatgccgagttctttaggcgtgcattcttatgatgagagcttgaatttagccaaaaagaattgcgttaaaaattgtaagaaagctttaggagattttacagaaaaaatcaaagaatcccccaacgatttgaacgctataaacgaagcttttaatcatttggaaacagagttagaacgcgctacagaaaatttgagccaaaaaatagcgcctattttagagcggtatgaaaatgataagcggcaaaaattgggttatggcgagtttttagaaaaagaaaaagagggctttatggtagatgagcaaaacccttatccggaagaagtccgctttaatgagttgcgtttagcggaatttgagagcgtttttagcgccattgtgcctttagaggatttagataaacctgcatgcgctcatcatgccctaaaggctttagaagccacgcttaaaaatagggatttgggctttgatgcgacagaattggaacagatcgcaaaaggtttcattcctaaggggtatttgtggcattttgacgcgaatgttttagggaatgtggcgttggtgagagaagagttattattaggcgtgaaacacacgaaaggatacttactatggaaacaattcctgcaaactcagaac

SEQ ID NO: 5 - DNA, 795 bp, Artificial Sequence
  Description of Artificial Sequence:  Synthetic Primer
atgaacacttacgctcaagaatccaagctcaggttaaaaaccaaaataggggctgatgggcggtgcgtgattgaagacaattttttcacgcccccctttaagctcatggcgcccttttaccctaaagacgatttagcggaaatcatgcttttagcggtaagccctggcatgatgaggggcgatgcgcaagatgtgcaattaaacatcggtccaaattgcaagttaaggatcacttcgcaatcctttgaaaaaatccataacactgaagatgggtttgccagcagagacatgcatattgttgtgggggaaaacgcttttttagattttgcgcctttcccgttaatcccctttgaaaacgcgcattttaagggcaacaccacgatttctttgcgctctagctctcaattgctctatagtgaaatcattgtcgcagggcgagtggcgcgcaatgagttgtttaaattcaaccgcttgcacaccaaaatctctattttacaagatgagaaacccatctattatgacaacacgattttagatcccaaaaccaccgacttaaataacatgtgcatgtttgatggctatacgcattatttgaatttggtgcttgtcaattgccccatagagctctctggtgtgcgagaatgcattgaagaaagcgaaggggtggatggggcagtgagtgaaaccgctagttctcatttatgcgtgaaagctttagcgaaaggctcagaacccttattgcatttaagagaaaaaatcgctcgcttggttacgcaaaccaccacgcaaaaggtt

SEQ ID NO: 6 - DNA, 1707 bp, Artificial Sequence
  Description of Artificial Sequence:  Synthetic Primer
atgaaaaagattagcagaaaagaatatgtttctatgtatggccctactacaggcgataaagtgagattgggcgatacagacttgatcgctgaagtagaacatgactacaccatttatggcgaagagcttaaattcggtggcggtaaaaccctgagagaaggcatgagccaatccaacaaccctagcaaagaagaattggatctaatcatcactaacgctttaatcgtggattacaccggtatttataaagcggatattggtattaaagatggcaaaatcgctggcattggtaaaggcggtaacaaagacatgcaagatggcgttaaaaacaatcttagcgtaggtcctgctactgaagccttagccggtgaaggtttgatcgtaactgctggtggtattgacacacacatccacttcatttcaccccaacaaatccctacagcttttgcaagcggtgtaacaaccatgattggtggcggaactggtcctgctgatggcactaatgcgactactatcactccaggcagaagaaatttaaaatggatgctcagagcggctgaagaatattctatgaacttaggtttcttggctaaaggtaacgcttctaacgacgcgagcttagccgatcaaattgaagctggtgcgattggctttaaaatccacgaagactggggcaccactccttctgcaatcaatcatgcgttagatgttgcagacaaatacgatgtgcaagtcgctatccacacagacactttgaatgaagccggttgcgtggaagacactatggcagctattgccggacgcactatgcacactttccacactgaaggtgctggcggcggacacgctcctgatattattaaagtagctggtgaacacaacattcttcccgcttccactaaccccactatccctttcactgtgaatacagaagcagaacacatggacatgcttatggtgtgccaccacttggataaaagcattaaagaagatgttcagttcgctgattcaaggatccgccctcaaaccattgcggctgaagacactttgcatgacatggggattttctcaatcaccagctctgactctcaagctatgggtcgtgtgggtgaagttatcactagaacttggcaaacagctgacaaaaacaaaaaagaatttggccgcttgaaagaagaaaaaggcgataacgacaacttcaggatcaaacgctacttgtctaaatacaccattaacccagcgatcgctcatgggattagcgagtatgtaggttctgtagaagtgggcaaagtggctgacttggtattgtggagtcccgcattctttggcgtaaaacccaacatgatcatcaaaggcgggttcattgcgttgagtcaaatgggtgacgcgaacgcttctatccctaccccacaaccagtttattacagagaaatgttcgctcatcatggtaaagccaaatacgatgcaaacatcacttttgtgtctcaagcggcttatgacaaaggcattaaagaagaattagggcttgaaagacaagtgttgccggtaaaaaattgcagaaacatcactaaaaaagacatgcaattcaacgacactaccgctcacattgaagtcaatcctgaaacttaccatgtgttcgtggatggcaaagaagtaacttctaaaccagccaataaagtgagcttggcgcaactctttagcattttc

SEQ ID NO: 7 - DNA, 1707 bp, Artificial Sequence; identical to SEQ ID NO: 6
  Description of Artificial Sequence:  Synthetic Primer

SEQ ID NO: 8 - DNA, 1371 bp, Artificial Sequence
  Description of Artificial Sequence:  Synthetic Primer
atgcgttattttcttgtagttttcttgtttttgtttgtgggttgcacaaaaaaggatttcacgctcaaagatttatccttgccccaagaggcttcaagctatcttgcaagctctcaaaatggcagtaacaacaaccaaagcattgacccccaagcgttaagagaaaatctgaaagagagctatctcaaagcgtggtattccccatggctagatatgaaagtcaaaagcaataaaaaagaagtgttttggatccttaaggagatgaataaatccaccggttatggcgaagatctaaaacccaacgcaaaagctttcaatgacgcactcattaagagcatggatattgagcattaccctagcgttaagattagggctgttgtagcgcgagatagcgatgtgagggctgtgcctactaacaaaccttattatctttctcaaaaaggctatccttttgataggtatcaaaattcgctgatttttcaaggcacgccggttttaatcacgcattttaatctagataaaacttatgcccacattcaaagcagttttgtttatggctggatcaaagttagcgatttagtctacatgcacgataaagacatagagcttttaacccatcttaaagattatgtcatgcctataaaagataaaatccccctttatacagactatggggatttttacaccaacgccagagtgggcgaattgttcgctctcatcccccaaagtcaaaaaacacctcaaaaaccccaaaaaaaggaattgaaagcctatggttttttgagagacgctaagggttatgcagctttacaaagcgtgatcttagaagaaaaggatttttttgttttccctaaggcttttaacagcgagaacatggcgtattttatagacaccatgttagggcaaaaatacggctggggcgggctattgggtaatagggattgctcggctttcaccagagatagttttgctaattttggtattttgctccccagaaattcctatgcgcaaagccgttatgcgaacaattatgtggatttaagctctatgaaagccaaagaaaaagaagactacatccttaaaaacgccacgccttttggaacgctcatctatttaaaagggcatatcatgctttatttaggcgcacacaaccatcaagcgatagtcgctcacagcatttggtcggtgcaaacccaaaagcattttaaaaccttgagccataaaataggaggcgtggtgatcacttcgttatggttagctgaagagcataatggggcgttttctaaaaagaaattattgattgatagggtgcttggaatgagcgatttgaaagattttgtcaataaaacttcaagccctttaaatgcgaat

SEQ ID NO: 9 - DNA, 2013 bp, Artificial Sequence
  Description of Artificial Sequence:  Synthetic Primer
atgaaaaagaaagctaacgaagaaaaagcccaaaaaagagctaaaacagaagccaaagcagaagccacacaagaaaataaaactaaagaaaacaataaagccaaagaaagcaaaattaaagaaagcaaaatcaaagaagctaaagcgaaagaacctattcctgttaaaaagcttagttttaatgaagcgttagaagaattgttcgctaattccttaagcgattgcgtttcttatgagtccatcattcaaatcagcgcgaaagtccccactctagcccaaatcaaaaaaatcaaagaattgtgccaaaaataccaaaagaaattagtcagctcttcagaatacgctaaaaaactcaatgcgattgacaagattaaaaaaaccgaagaaaagcaaaaagttttagatgaagaattagaagatggctatgactttttgaaagaaaaggattttttagagtggagcagaagcgatagcccagtgcgcatgtatttgcgcgaaatgggggatataaaacttttaagcaaagatgaagagattgaattgagcaagcaaatccgcttgggtgaagacattattttagacgcgatctgctcggtgccgtatttgattgattttatctatgcgtataaagacgctttaatcaatcgtgaaagaagggttaaagagcttttcaggagctttgatgatgacgatgaaaatagcgtgagcgattctaaaaaagatgaagacaacgaagaagatgaagaaaacgaagaaaggaaaaaagtcgtttctgaaaaagacaagaagcgtgtagaaaaggttcaagaaagctttaaagccctagacaaggctaaaaaagaatggcttaaagcccttgaagcccccatagatgaaagagaagacgaattggtgcgttcattgaccctagcttacaaacgccaaacactcaaagacagactctatgatttagaacctaccagcaaactgattaatgaattagtcaaaacgatggaaaccactttaaaaagcggcgatgggtttgaaaaagagttgaaacgcttggaatacaaactgcccttattcaatgacactctcatcgcaaaccataaaaaaatccttgccaatatcactaacatgactaaagaagatattatcgctcaagtgccagaagcgactatggtgagcgtgtatatggatcttaaaaagctttttttgactaaagaagcgagcgaagaaggctttgatctagcccccaacaagctaaaagaaattttagagcaaatcaaaagagggaagttgatttccgatcgcgctaaaaacaaaatggctaaatccaatttaaggttggtggtgagcatcgctaaacgattcacgagcagaggcttaccattcttggatttgattcaagagggcaatattggcttgatgaaagcggtggataagtttgagcatgaaaagggcttcaagttttctacctatgcgacctggtggatcaaacaagctatcagcagagccatagccgatcaggcccgcactatccgcatccccattcacatgattgatacgattaatcgcatcaataaagtcatgcgcaaacacattcaagaaaacggcaaagagcctgatttagaagtggtggctgaagaagtggggctttcgttagataaagtgaagaatgtgattaaggtgactaaagagcctatcagtttggaaaccccagtcggcaatgatgatgatggcaagtttggggatttcgtggaagataagaatatcgtcagctccattgatcacatcatgcgagaagatttgaaagcacaaattgaaagcgttttggatcagttgaatgagcgagaaaaagcggtgatccgcatgcgttttgggcttttagacgatgaaagcgatcgaactttagaagaaattggcaaggaattgaatgttactagagaaagggtgcgccagattgaaagctctgcgattaaaaaattgagaagcccgcagtacgggcgcattttaagaaactatttgcgcatt

SEQ ID NO: 10 - DNA, 693 bp, Artificial Sequence
  Description of Artificial Sequence:  Synthetic Primer
atggtgcaaaaaattggcattttaggggcgatgagagaagaaataacccctatactagaattgtttggcgtggattttgaagagatccctttaggggggaatgtcttccataaaggcgtttatcacaacaaggaaatcattgtcgcttatagcaagattggcaaggtgcattccactttaaccacaacgagcatgattttagcgtttggcgttcaaaaggtgctttttagcggggtggctggaagcttagttaaagatttaaaaatcaatgatttactagtggctattcaattagtccagcatgatgtggatttgagcgcgtttgatcaccctttagggttcatcccagaaagcgcgatttttattgaaacgagcgaaagtttgaacgctttggctaaagaagtcgctaatgaacagcatatcgtgctcaaagaaggcgtcatcgcatcaggcgatcagtttgtgcatagcaaagaaaggaaagagtttttagttagcgagtttaaagcgagcgcggtggaaatggagggggcgagcgtggcgtttgtgtgccaaaaatttggcgtgccatgctgtgtgttaaggagcattagcgataacgctgatgaggaagctaacatgagctttgatgcgtttttagaaaaaagcgctcaaacttcagcgaaattcttaaaaagcatggtggatgagctt

SEQ ID NO: 11 - DNA, 1542 bp, Artificial Sequence
  Description of Artificial Sequence:  Synthetic Primer
atgagttttaggataaataccaatatcgccgctttaacttctcatgcggtaggggttcaaaacaacagagacctttcaagctcgcttgaaaagttaagctcagggcttaggatcaataaagccgctgacgattctagtgggatggcgatcgctgatagcttaaggagtcaaagcgcgaatttgggtcaagcgatccgcaacgccaatgacgctattggtatggttcaaaccgcagataaagcgatggatgagcaaatcaaaatcttagacaccattaaaaccaaagccgttcaagccgctcaagatgggcaaactttagaaagccgaagagcgctccagagcgatattcaaaggttgttagaagaactggacaatatcgctaacaccacaagctttaacggccaacaaatgctttcaggaagtttttctaacaaagaatttcaaattggcgcgtattctaacgccacggttaaagcgtctattggctcaacgagctcagataagattgggcatgtgcgcatggaaacttcttcttttagcggtgcaggcatgctcgctagcgcggcggcacaaaacttgactgaagtgggattgaatttcaaacaagtcaatggcgtgaatgattataagattgaaaccgtgcgcatttctacgagtgctggcactgggattggagcgttaagcgaaatcatcaatcgtttttctaacactttaggcgttagggcttcttataatgtcatggctaccggcggcactcccgtgcaatcaggaactgttagggagcttaccattaatggcgtagaaattgggaccgtgaatgatgtgcataaaaacgacgctgatgggagattgactaatgcaatcaactccgtcaaagacaggacgggtgtggaagcgagcttggatattcaagggcgcattaatttacactccattgacgggcgcgcgatttctgtgcatgcagcgagcgcgagcggtcaggtttttgggggagggaattttgcagggatttctgggacacagcatgcggttattgggcgcttaaccttgaccagaaccgacgctagagacatcattgtgagcggtgtgaatttcagccatgtgggctttcattccgctcaaggggtggcagaatacaccgtgaatttgagagcggttaggggcatttttgatgcgaatgtggcttcagcagccggagcgaacgctaatggcgcgcaagcggagaccaattctcaaggtataggggctggggtaacaagccttaaaggggcgatgattgtgatggatatggcagattcagcgcgcacgcaattggacaagatccgctcggatatgggttcggtgcaaatggaattggttacaaccattaataatatttctgtaacccaagtgaatgttaaagcggctgaatctcaaatcagagatgtggattttgctgaagagagcgcgaacttttctaaatacaatattttggcgcaaagcgggagttttgctatggcgcaagcgaatgcggtgcaacaaaatgtcttaaggcttttacaa

SEQ ID NO: 12 - DNA, 897 bp, Artificial Sequence
  Description of Artificial Sequence:  Synthetic Primer
atgaaaaaaaatatcttaaatttagcgttagtgggtgcgttgagcacgtcgtttttgatggctaagccggctcataacgcaaataacgctacgcataacacgaaaaaaacgactgattcttcagcaggcgtgttagcgacagtggatggcagacctatcactaaaagcgattttgacatgattaagcaacgaaatcctaattttgattttgacaagcttaaagagaaagaaaaagaagccttgattgatcaagctattcgcaccgcccttgtagaaaatgaagctaaaaccgagaaattggacagcactccagaatttaaagcgatgatggaagcggttaaaaaacaggctttagtggaattttgggctaaaaaacaggctgaagaagtgaaaaaagtccaaatcccagaaaaagaaatgcaagatttttacaacgctaacaaagatcagctttttgtcaagcaagaagcccatgctaggcatattttagtgaaaaccgaagatgaggctaaacggattatttctgagattgacaaacagccaaaggctaaaaaagaagctaaattcattgagttagccaatcgggatacgattgatcctaacagcaagaacgcgcaaaatggcggtgatttggggaaattccaaaagaaccaaatggctccggatttttctaaagccgctttcgctttaactcctggggattacactaaaacccctgttaaaacagagtttggttatcatattatctatttgatttctaaagatagccctgtaacttatacttatgaacaggctaaacctaccattaaggggatgttacaagaaaagcttttccaagaacgcatgaatcaacgcattgaggaactaagaaagcacgctaaaattgttatcaacaag

SEQ ID NO: 13 - DNA, 2436 bp, Artificial Sequence
  Description of Artificial Sequence:  Synthetic Primer
gtgcgatatatcaagtttttcaaagagttgaacaataaaaatgtgaatctggttgggggcaagaacgctagtattggtgaaatgtttcaagaattagtgcctattggtattaaagtgcctgatggctttgcgatcaccagcgaagcgtattggtatcttttagagcaaggaggggctaaacaaaaaatcatagagcttttagaaaatgttgatgccaccgaaattgatgtgttaaaaatccgctccaaacaaatcagagagcttatttttggcacgccttttcctagcgatttgagagatgagatttttcaagcttatgagattttaagccagcaataccacatgaaagaagccgatgtggctgtaaggagttccgctactgcagaagatttgccggacgcttcttttgccgggcagcaagacacttatttaaacattaagggtaaaaccgaattgatccactatatcaaatcctgtttagcgtcgctttttaccgatagagcgattagctatagggcgagtcgtgggtttgatcatttaaaagtcgcgctcagcgtgggggtgcaaaaaatggtgcgagcggataaaggcagcgcgggcgtgatgttttctattgacaccgaaaccggttttaaagacgcggtgtttatcacttcagcgtgggggttaggcgaaaatgtggtgggtggcacgataaaccctgatgaattttatgtgtttaagcccactttagagcaaaacaaacgccccattatcaaacgccaactcggcaataaaacgcaaaaaatggtctatgccccaaggggtagcgaacaccccaccagaaacattaaaaccaccaaaaaagaatggcaatccttttcattgagcgatgaagacgtgctgattttagccaaatacgccattgaaattgaaaaacactactctaaagaagccaaacaataccgccctatggatatagaatgggctaaagatggcgagagcggggaaatctttatcgttcaagcgcgcccagaaaccgttcaaagccaaaaaagtaaagaagaaagtcaagtctttgaaaaattcaaattcaaaaaccctaacgaaaagaaagagattatcttacaaggcagagcgattgggagtaaaattggctcaggaaaagtgcgcatcatcaatgatttggagcacatgaattcttttaaagagggcgaaattttagttacggataacaccgatccggactgggagccttgcatgaaaaaagcgagcgcggttatcactaatcgtggagggcgcacttgccatgccgctattgtggcgagagaaattggcgtgccagctatcgttggggtgagcggggcgactgatagcctttataccggcatggaaatcacggtttcttgcgctgagggcgaagagggctatgtgtatgcgggcatttatgagcatgaaattgaaagggtggagctttctaacatgcaagaaactcaaacaaaaatttacatcaatattggaaaccctgaaaaagcctttggcttttctcaactccctaatcacggcgtagggctagccaggatggaaatgattattttaaatcaaatcaaagcccaccctttagctttagtggatttgcaccacaaaaaaagcgtgaaagaaaaaaatgaaattgaaaacctcatggcaggctatgctaaccctaaagatttttttgtgaaaaaaatcgctgaaggcattggcatgatcagtgcagcgttttaccctaaacctgtcattgtgagaacgagcgatttcaaatccaatgaatacatgcgcatgcttggcggctctagctatgagcctaatgaagaaaaccccatgcttggctataggggggctagtcggtattattcagagagctataatgaagcgttttcgtgggagtgtgaagccttagcgttagtgagggaagaaatgggattaaccaacatgaaagtgatgatcccttttttgcgaaccattgaagagggtaaaaaagtcctagaaatcttaagaaaaaacaatttagaatccggtaaaaacgggcttgaaatttatatcatgtgcgaattgccggtgaatgtcattttggctgatgatttcttgagcttgtttgatggcttttctattggatcaaacgatttaacccagctcactttaggcgtggatagagacagcgaattggtcagccatgtctttgatgaaaggaatgaagcgatgctaaagatgtttaaaaaagcgattgaagcttgcaaaaggcacaacaaatattgcgggatttgcgggcaagccccaagcgattaccctgaagtaacagagtttttagtcaaagagggcatcacttccatttctttaaaccctgatagcgtgatccccacttggaacgctgtagccaagttagaaaaagaactaaaagaacatggcttaactgaacat

SEQ ID NO: 14 - DNA, 1836 bp, Artificial Sequence
  Description of Artificial Sequence:  Synthetic Primer
atgagtgcggaactgattgctgtttataaagacgagcaaataatagatttagagagcgcgaaagtcttagggctgagcgatgggattaaagcgttaaacgggacagagccgatatattttgatgattcgcctttggctttagaggtgattaggcattcatgcgcgcatttgcttgcgcaaagcttgaaagccctttatccggacgcgaaattttttgtaggccctgtggtagaagaggggttttattacgatttcaagacttcttcaaaaatcagcgaagaggatttgcctaaaattgaagcgaaaatgaaagagtttgcgaagttgaaactcgctatcactaaagagactttaaccagagagcaagctttggagcgttttaagggcgatgaattaaagcatgcggtgatgagtaaaatcggtggcgatgcctttggcgtgtatcaacaaggcgagtttgaagatttgtgtaaggggccgcatctcccaaacacccgttttttaaaccattttaagctcactaaactggctggggcttatttgggcggcgatgaaaacaatgaaatgctcattagaatctatggaatcgcttttgccaccaaagagggtttaaaagactatcttttccaaatagaagaagcgaaaaaacgagatcacagaaagctaggcgtggagctagggctttttagctttgatgatgagataggggcgggcttacctttatggctgcctaaaggggcaaggcttaggaagcgcattgaagatttattgagtcaagcgttacttttaagaggctatgagccggttaaaggtcctgagattttaaagagcgatgtgtggaaaatcagcgggcattatgacaactataaagaaaacatgtatttcaccacgattgatgagcaagaatatggcataaagcctatgaactgcgtggggcatattaaagtctatcaaagcgctttgcacagctacagagatttgcccttaaggttttatgaatacggcgtggtgcatcggcatgaaaaaagcggcgtgttgcatgggcttttaagggttagggaatttacccaagatgatgcacatattttttgctcttttgaacagatccaaagcgaagtgagcgcgattttagattttacgcacaaaatcatgcaagcgtttgattttagctatgaaatggaattatccacaaggccggctaaatccataggcgatgataaagtttgggaaaaggccactaacgctttaaaagaagccttaaaagaacaccgcattgattacaagattgatgaagggggaggggctttctatgggcctaagattgacattaaaatcactgacgctttaaagcgtaaatggcagtgtggcacgattcaagtggatatgaatttgcctgaacgcttcaagctcgctttcactaatgagtataatcacgctgagcagccggtgatgatccacagagcgattttaggctcgtttgaaaggtttattgcgattttgagcgaacattttggggggaatttccctttctttgtcgcgcccactcaaatcgctctcatccctattaatgaagagcatcatgtttttgctttgaaattaaaagaggcgctaaaaaagcgcgatatttttgtagaagtgttagataaaaacgacagcttgaataaaaaggtgcgattagccgaaaagcaaaaaatccctatgattttagtgttagggaatgaagaagtggagaccgaaattttatccattagagacagagaaaaacaagatcaatataaaatgcccttaaaggagtttttaaacatggttgaatctaagatgcaagaggttagtttt

SEQ ID NO: 15 - DNA, 858 bp, Artificial Sequence
  Description of Artificial Sequence:  Synthetic Primer
gtgaaacggattttattttttttagtagctacgacttttttgttgagagcagaaacggattctgccactattaacactacagttgatcccaatgttatgttttctgaaagctccacagggaatgtgaaaaaagaccgcaagagggttttaaagagcatggttaatttggaaaaagagcgcgtgaagaattttaaccggtattctgaaaccaagatgagtaagggcgacttatccgcttttggagctttctttaaggggagtttggaaagttgtgtggatcaaaagatttgttattatgagcataaagatggcaaggtttcttttgtggtgaatgacagggagaagttttataaacatgtgcttaaagacttagggacagagctttcgctccctttgtttaactggctttacaaaggctcggattttggggctttgcatgagcagtttggggatatgtatgatgggtatatcaaatacttgatcagtatggttagaataagccaaaaagaaaaggctagaaaagtggatgcaatcgttcttaagaaaatggaagaacaagctgagaaagacactaaggcagcgtttcaaaagaggagcagtggggagcttgaaagccatactgatagccctgaatttataagctcttctaagaggacacagaacgcttctaattcggatctcaattctatgaccaatgctaacgcgctcaaagaaacagcttcaaaagagccagaggcttcttcaaaaaaagagaaaaagtctaagaaaaaacgtcgcctttcaaagaaagaaaaacaacaacaagccttgcaacaagagtttgaaaaacaaattagcgactctagtaagtctgaaaaa

SEQ ID NO: 16 - DNA, 588 bp, Artificial Sequence
  Description of Artificial Sequence:  Synthetic Primer
atgaaagaaaaaaacttttggcctttagggatcatgagcgtgctcattcttgggcttgggatcgtggtgtttttggtggtgtttgccctaaaaaattcgcctaaaaacgatttagtgtattttaagggccataacgaagtggatttaaactttaacgctatgcttaaaacctatgaaaactttaaatccaattatcgttttttggtgggtttaaagccccttattaaaagccctaaaacccccattttgccctatttttctaaaggcacgcatggggataaaaaactccaagaaaaccttttaaacaacgctttgattttggaaaaatccaacacgctttatgcgcaattgcaaccgctcaaacccgctttagattcgccaaacattcaagtgtatttagcgttttatcccagtccatcacagcccagatggttaggaacgcttgattgtaaaaacgcatgcgagcctttaaaatttgatttgttagagagcgacaaaatggggcgttataagatcctttttaaatttgtttttaaaaataaagaagaattgattttagaacaactggcttttttcaagcaacgcatt

SEQ ID NO: 17 - DNA, 1248 bp, Artificial Sequence
  Description of Artificial Sequence:  Synthetic Primer
atggcgtattttttagaacaaacggatagtgaaatttttgagcttatctttgaagaatacaagcggcaaaatgagcatttagaaatgatagcgagcgagaattacacttttgcaagcgttatggaggctatggggagtgttttaacgaataaatacgctgaaggctaccctaacaagcgctattatggaggctgtgaagtggtggataaaatagaaagcctagccatagaaagggctaaaaagctttttaattgccagttcgctaacgtgcaagcgcattcaggctcacaagccaataacgctgtctatcacgctcttttaaagccttatgacaagattttaggcatggatttaagctgtggagggcatttaacgcatggcgctaaagtgagtttaaccggcaagcattatcagagcttttcttatggcgtgaatttggatggctatattgattatgaagaggcgctaaaaatcgctcaaagcgttaagccagaaatcatcgtgtgcgggttttcagcctatccaagggagattgattttaagaaatttagagaaatcgctgatgaagtgggggcgttactattaggcgatatagcccatgtggcagggcttgtggtaaccggtgagcatgcccatcctttcccgcattgccatgtggtttcaagcaccactcataagaccttaagagggcctagaggggggattattttaactaatgatgaagagatagcggctaagattgacaaagcgatttttccaggaactcaaggcgggcctttgatgcatgtgattgctgctaaagcggtgggttttaaagagaatctaaaaccagaatttaaagcttatgcacaattagtgaaatctaacatgcaagttttggctaaagcgttaaaagaaaaaaaccataagttagtgagtggtggcacttctaaccatttgcttttaatggattttttagataagccttatagcgggaaagacgctgatattgcattagggaatgccggaatcaccgtgaataaaaacaccattcctggtgaaacgcgcagcccttttgtaacgagcgggataaggattggctcagcggcattgagcgcaaggggcatgggagctaaggaatttgaaatcatagggaataaaatatcagatattttgaatgatattaataatgttagtttgcaattgcatgtgaaagaagaattgaaagccatggtcaatcaattccctgtgtaccaccaacctattttt

SEQ ID NO: 18 - DNA, 2142 bp, Artificial Sequence
  Description of Artificial Sequence:  Synthetic Primer
atgaaaataacatattgtgatgcgctaattattggaggcggactagctgggttaagggctagtatcgcatgcaaacaaaagggtttaaacaccatcgttttaagcctagtgcctgtcaggcgttcgcactctgcagccgctcaagggggcatgcaagcgagccttgcgaacgctaaaaaaagcgagggcgataatgaagatttacactttttagacacggttaaggggagcgattgggggtgcgatcagcaagtggctaggatgtttgtaaccactgctcctaaagccattagggaattggccagttggggggtgccttggactaggattaaaaagggcgataggcctgcggtcgtcaatggtgagcatgtaactatcactgaaagagacgacaggcatggttatatcttaagccgtgattttggcggcactaaaaaatggcgcacatgctttacggctgatgccacagggcataccatgctttatgcggtcgctaatgaagccttacaccacaaagtggatattcaagacagaaaggacatgctcgctttcattcatcatgataataaatgctatggggcggtggtaagggatttgatcacaggcgaaatttcagcgtatgtttctaaaggcacgcttttagctaccggaggttatgggcgcgtgtataaacacaccactaacgctgtgatttgcgatggagccggggctgcaagcgccttagaaaccggcgtggctaaattgggcaacatggaagcggtgcaattccaccctaccgctttagtgccaagcgggattttaatgaccgaaggttgcaggggcgatggcggtgttttaagagacaagtttggcagacgcttcatgcccgcttatgagccggagaaaaaagagcttgcaagcagagatgtggtctcaaggcggattttagagcatatccaaaaaggctatggagccaaatcgccttatggggatcatgtgtggctggatattgctattttagggcgtaaccatgtggaaaaaaacttaagggatgtgcgcgatatagccatgacttttgcgggcattgatccggctgatagcaaggaacaaaccaaagacaacatgcaaggagtgcccgcaaatgagcctgaatacgggcaagcgatggccaagcaaaaaggctggatccccataaaacccatgcaacactattctatgggtggggttaggacaaaccctaaaggcgaaacccatttaaaaggcttgttttgcgcgggtgaagcggcatgctgggatttgcatgggtttaaccgcttggggggtaattctgtgagtgaagcggtggtcgctggcatgatcattggggattattttgcctcgcattgtttagaagcgcaaattgaaatcaacacgcaaaaagttgaagctttcattaaagaaagccaagactatatgcattttttattgcataatgaaggcaaagaagatgtgtatgaaattagagagcgcatgaaagaagtcatggatgaaaaagtgggcgtttttagagaaggcaaaaggctagaagaagcccttaaagaattgcaagagctttatgcacgctccaaaaacatttgcgtgaaaaacaaggttttacacaataaccctgaattagaagacgcttaccgcaccaaaaaaatgctcaaactcgcgctttgtatcactcaaggagcgttactgcgcactgaaagcagaggggctcacacaaggattgactaccctaaaagagacgatgaaaaatggcttaatcggactctagcgagctggcctagcgctgagcaagacatgcccacgattgaatacgaagaattagatgtgatgaaaatggaaatcagccctgattttaggggctatggcaaaaagggtaatttcatcccccaccccaaaaaagaagagcgcgacgctgagattttgaaaacgattttagaactagaaaagcttggaaaagacagaatagaagtccaacatgcgctcatgccttttgaattgcaagaaaaatacaaggctaggaatatgcgtttagaagatgaggaagtcagggctaggggggaacatttgtattctttcaatgtccatgagttattggaccaacacaacgctaacctaaaaggagaacaccatgag

SEQ ID NO: 19 - DNA, 1155 bp, Artificial Sequence
  Description of Artificial Sequence:  Synthetic Primer
atgaaagatagttttcttttcacttctgaatcagtaaccgaggggcatcctgacaaaatggctgatcaaatcagcgatgcggttttagattacattattgagcgggatcaaaaagccaaagtcgcatgcgagactttagtttctaacgggttttgcatgatcactggcgagttaaaaacttctgtttatgcccctatgcaagagattgcaagagaagtggttaaaaagattggttatacggacgctctttatggctttgattacaggagcgcggcggttttgaatggcgttggcgagcaaagccctgatattaatcaaggcgtggatagagaagatggcgagattggggcaggggatcaagggcttatgtttggttatgcatgcaaagagactgaaacgctcatgcccttacccattcatttagcgcaccagctcactttcgctctggctcaaaaaagaaaagacaacactctgccttttttaaggcctgatggcaagtctcaagtgagcgtgcgttatgaaaacaacaagcctgtaagcattgatacgattgtcatttccacccaacattccccagaagtttcacaaaaacatttaaaagaagctgtgattgaagagatcgtgtataaggttttatccaaagaatatttgcatgacaatatcaagttttttgtcaatcctacaggaaaattcgttatcggtgggccgcaaggcgatgcgggcttgacgggcagaaaaatcatcgtggatacttatggggggagttgcccgcatggcgggggagcgtttagcgggaaagaccctagcaaagtggataggagcgcggcttatgcggcccgctatgtggctaaaaatttggtagcgagtggggtttgcgataaagcgaccgtgcagcttgcttatgcgattggggtgatagagccagtgtctatttatgtgaacacgcataacacgagcaagtattcaagcgctgagttggaaaaatgcgtgaaatcggttttcaaactcacgccaaaaggcattattgaaagcttggatttattaagacccatttattcgctcacttcagcttatgggcattttgggcgcgaattagaggaattcacttgggaaaaaaccaacaaagctgaggagattaaagcgttctttaagcgt

SEQ ID NO: 20 - DNA, 1014 bp, Artificial Sequence
  Description of Artificial Sequence:  Synthetic Primer
atgatgaaaattgtaatagacttaatgggggctgaccatggggttttacccgttattgagggagtctcaagggctttagaaaataagagttttagcacggttttagtgggggataaagacaaagcaaccccttttatttctaaagagttagccagcaaagtggaaatgatccacacgcaagattacatcaagatggaagaagccgccactgaggcgatcaagcgtaaggaatcttccatttacttgggcatggatattttaaaaaatggggctgacgctttgatttcagcggggcatagcggagcgactatgggtttagccaccttgcgtttagggcgtatcaagggggttgaaaggcctgctatttgcactttgatgcctagcgttggcaaacgccctagcgtgctgttagacgcaggagcgaacaccgattgcaagcctgaatatttgattgattttgctcttatggggtatgaatacgctaaaagcgtgttgcattatgatagccctaaggtgggtcttttgagtaatggcgaagaagatattaaagggaacatgctcgttaaagaaacgcataaaatgctgaaagcttatgacttcttttatggcaatgtggaggggagcgatatcttcaaaggggttgtggatgtggtagtttgcgatggctttatggggaatgtggtcttaaagacaacagaaggggtcgctagcgcaataggctctatttttaaagatgaaattaaaagctcttttaaatctaaaatgggggctttgatgcttaagaatgcgtttgatattttaaaacaaaaaaccgattacgctgaatatgggggagcgccgcttttgggcgtgaataaaagcgtgatcatcagccatggcaagagcaacgctagagcgattgaatgcgcgatttatcaggctattagcgctgttgaaagtcaggtttgtttgaggattactcaagcgtttgagagcttgaagcctagcgtttctcaaagtgatcagcaagacgct

SEQ ID NO: 21 - DNA, 993 bp, Artificial Sequence
  Description of Artificial Sequence:  Synthetic Primer
atggaattttacgcctctcttaaatccattgcgatgcatgttccaagcgagcgtgtgaaaaatgcagagttccagcaatttttggataccagcgatgagtggatagaaaaaaggaccggtatcaaagaacgccgtttcgctaacgatgaagaaaaaagcagcgatttaggggtaatagcggctaaacaagccatagagagagcgcatttaaccccaaaagacattgatttggtggttgtagcgactttaagccctgattttttggccatgccttcaaccgcttgcgtgttgagcgcgaaattaggcattgaaaacaagccggcgtttgatatttcagccgcttgcacgggttttatctatttattatcggtggctaaggcttatgttgagagcgggatgtatgaaaatgtgctgattgtgggggcagaaaaaacgagcagcgtgttagattttaaagacagggggacttgtattttatttggcgatggggctggggcgtgcgtgataggcagaaccaagcgtttaaaagaaagcattttagatgtgcaaatttcagcgaacgggaatttttctaattatctctatacgccaaggactctaaaacccacgccctttaacgctaaagaagaagcttcagagccttttttgtgtatgaaaggcaatgaagtgtttaaactagcggtaaaaacgcttttaaaagatgtggaaatgatcttagaaaaaaacgctctcaaacctgaagacgtgcgtttgtttatcccgcatcaagctaattttaggatcattcaagcggtgcgggagcatttggattttaaagatgagcaagtggttttaaccgtgcataaatacggcaacacttcagcagccagtatccctatggctatgggtgaagcttatgaagaggggcgtttgaaaaagggcgatttaatgcttttagacgcttttggtggaggattgacttggggttcagcgttggtgtattttggaggaagt

SEQ ID NO: 22 - DNA, 1863 bp, Artificial Sequence
  Description of Artificial Sequence:  Synthetic Primer
atgtctaatcaagaatacacctttcaaactgaaatcaaccagcttttggatttgatgatccactctttgtattctaataaagagatttttttaagagagttggtttctaacgcgagcgacgctttggacaagctgaattatttaatgctgaccgatgagaaattaaaagggctgaataccacgcctagcattcatttgagttttgatagccagaaaaagaccttaacgattaaagataatggtataggcatggataaaaacgatctcattgagcatctaggcacgatcgctaaatcaggcacgaagaattttttaagcgctttgagtggggataagaaaaaagatagcgctttaattggccagtttggcgtgggcttttattcagcgtttatggtagcgagtaagatcgtcgttcaaaccaaaaaggtaaatagcgatcaggcttatgcatgggtgagcgatggtaagggcaagtttgaaatcagcgagtgcgttaaagatgagcaaggcacagaaatcaccctctttttaaaagatgaagattctcattttgcgagccgttgggagattgatagcgttgttaaaaagtattctgagcatatccctttccctatttttttaacttacaccgatacgaaacatgagggcgaaggggataatcaaaaagaaattaaagaagaaaaatgcgaacagatcaatcaagcgagcgctttatggaaaatgaataagagcgaattaaaagacaaagattacaaagagttttaccaatcgtttgcgcatgataacagcgaacctttgagctatatccataataaagtggaaggctctttagaatacacaacgcttttttacatccctagcacagcgccctttgacatgtttagggtggattataaaagcggggtcaaactttatgttaaaagggtgtttatcactgatgatgacaaagaattgttgccctcttatttgaggtttgttaaaggcgtgattgacagcgaagatttacccttgaacgtgagccgtgaaatcttacagcaaaacaagattttagccaatatccgttcggcttcagtgaaaaagattttaagcgagattgaacgcttgagcaaagatgaaaaaaattaccataaattctatgagcctttcgggaaagtgttaaaagaaggcttgtatggggattttgaaaacaaagaaaaacttttagaattgttaagattctattctaaagacaaagaaaaattaatttctttgaaagaatacaaagaaaatttaaaagaaaatcaaaaaagcatttactaccttttaggcgaaaatttagatttattaaaggcgtccccgcttttagaaaaatacgctcaaaaaggctatgatgttttgttattgagcgatgaaattgatgcgtttgtgatgccaggcgtgaatgaatacgataaaacgccctttaaagacgctagccatagcgagagtctgaaagagcttggtttggaagaaatccatgatgaggtaaaagatcagtttaaagatttaatgaaagcgtttgaagaaaatcttaaagatgagattaaaggtgtagagctttccagtcatctcacttcagcggtggctttaataggcgatgaacaaaatgcgatgatggctaattggatgcgtcaaatgggtcaaagcgtgcctgaaagcaagaaaacgctagaattaaaccctaaccacgcgattttgcaaaaactcttaaaatgtgaagataaagagcagttgagcgcttttatctggttgctttatgatggggcgaaacttttagaaaaaggggctttaaaagacgctaaaagttttaacgaacgcctaaatagcgtgctattgaaagcgttg

SEQ ID NO: 23 - DNA, 750 bp, Artificial Sequence
  Description of Artificial Sequence:  Synthetic Primer
atgctaggaaacgttaaaaaaaccctttttggggtcttgtgtttgggcacgttgtgtttgagagggttaatggcagagccagacgctaaagagcttgttaatttaggcatagagagcgcgaagaagcaagatttcgctcaagctaaaacgcattttgaaaaagcttgtgagttaaaaaatggctttggatgtgtttttttaggggcgttctatgaagaagggaaaggagtgggaaaagacttgaaaaaagccatccaattttacactaaaggttgtgaattaaatgatggttatgggtgtaacctgctaggaaatttatactataacggacaaggcgtgtcaaaagacgctaaaaaagcctcacaatactactctaaagcttgcgacttaaaccatgctgaagggtgtatggtattaggaagcttacaccattatggcgtaggcacgcctaaggatttaagaaaggctcttgatttgtatgaaaaagcttgcgatttaaaagacagcccagggtgtattaatgcaggatatatatatagtgtaacaaagaattttaaggaggctatcgttcgttattctaaagcatgcgaattaaaagatggtagggggtgttataatttaggggttatgcaatacaacgctcaaggtacagcaaaggacgaaaagcaagcggtagaaaactttaaaaaaggctgcaaatcaagcgttaaagaagcatgcgacgctctcaaggaattaaaaatagaactt

SEQ ID NO: 24 - DNA, 1170 bp, Artificial Sequence
  Description of Artificial Sequence:  Synthetic Primer
atgagaaagaaaggcatgtttgaaaagatacaaaaagaatggctgagcaacattcaaaaggatttgttgtctggttttgtggtggggctttctgtgatcccagagacggccggctttgcgatcatggtgggtttagatgtgggcgtggcgttttatacgaccttttacatggcttttgttttgtctctttttggggctagaaaggcgatgattagcgcagcggccggctcagtggcgctcattttagtgggcgtggttaaaaactatgggcttgaatacgcgggcgtggcgactcttatggcaggggtgttgcaaattcttttaggctatttgaaaatagggaatcttttgaggtttatcccccaatcagtgatgtatggctttgtgaacgcgctaggcattttgcttttaatggagcaattcaaattccttcaaaaccaaaatttgggggtgtttgtcttgctcgctattgggatactcatcatttatctttttcctctaatcactaaaaaaatcccctctaatctgatttgtatccttatagtgagcgcgatcgctttaatttttgatatgcatgcgccgaatttggggagcattgagcaaggggtttcaggctttcatttcatcattatccccaaaaatttggattttaaaataatgatagagttgttgccttacgctctttctttagcactagtgggaacgatagaaagcttattgacggctaaaactttagatgtgattttaaaagacggcgtgagcgataaaaataaagaaactaaagcgcaaggcttggggaatatcatctcagggcttttggggggaatgacagggtgcgctttagtggggcagtctatcattaacgcaaaatccggggctaaaacaaggctttctactttttttgccggcttttctttaatggtgctcatattagtgtttaatgaatatgtggttaagatccccattgtggcggttgtggcggtaatggtgatgatttctttcaccacttttaatttccaatccattattaacattaaaaaaatcaagctctatgacacgctcaacatgctcttagtcgtggcggtggttttatacacgcataatttagcgataggggttgtggtgggggttttagtcaatgcgttatggatcaaatctaaagggattgca

SEQ ID NO: 25 - DNA, 1449 bp, Artificial Sequence
  Description of Artificial Sequence:  Synthetic Primer
atgaaaaaaacgattttactttctcttatggtttcatcgctcctcgctgaaaatgacggcgtttttatgagcgtgggctatcaaatcggcgaagcggttcaacaagtgaaaaacaccggcgaaatccaaaaagtctccaacgcttacgaaaatttgaacaatcttttaacccgctataacgaactcaaacaaacggcctctaacaccaattcaagtaccgctcaagcgattgataatctaaaagagagcgctagccgattgaaaacgacccccaatagcgctaatcaagccgtgtcttcagcgctcagctctgcggtagccatgtggcaagtaatagtctctaatttagccaataactcgctacccactagtgaatacaacaaaatcaatgcgatttctcaatcgctccaaaacaccctagaaaataaaaacaatgatcttaaaattgaaaatgactacgaccatcttttaactcaagctagcaccattattaatacccttcaaagccaatgcccaggcatagacggaggcaatggcaaaccatggggcattaatgcaagcgggaacgcatgcaatatttttggcaacacctttaacgccatcactagcatgatagatagcgctaaaaaagccgccgcagatgcccgaagaactgccccagaaagtccaaaccaaccaagtgcgtttaacaacgctgatttcaataaaaaccttaatcaagtctcaagcgttattaatgacacgatctcttacctcaaaggggacaatttagcaaccatctacaacacccttcaaaaaacgcccgattctaaagggtttcaaagtttggtgagccgatctagctatagttattccctcaacgaaacccaatattctgaattccaaactaccaccaaagagtttggccataacccttttagaagcgtgggtttaatcaactctcaaagcaataacggagcgatgaatggcgtgggcgtgcaattaggctataagcaattctttgggaaaaataaattttttgggatccgttattatgccttttttgattacaaccatgcctatatcaaatccaactttttcaactccgcttccaatgttttcacttatggcgcaggcagtgatcttttattgaatttcatcaatggcggatccgataaaaaccgcaaagtctcttttggcatttttggaggcatcgctctagcaggcacgacatggcttaattcccaatttatgaatttaaaaaccaccaatagcgcctacagcgctaagatcaacaacaccaatttccaattcttattcaatactggtttaaggcttcaagggattcaccatggcgttgaattaggcgtgaaaatccccaccatcaacacgaattactattctttcatgggcgctaaattagcataccgaagactttatagcgtgtatttcaattatgttttggcctat

SEQ ID NO: 26 - DNA, 1065 bp, Artificial Sequence
  Description of Artificial Sequence:  Synthetic Primer
atgggtgtcaaatttttaaaaatattagtttgtgggttatttttttggagcttgaacgcccatttatggggaaaacaagacaatagttttttgggggttgctgaaaaagcctataaaagcgggaattattctaaagccacatcttattttaaaaaagcatgcaacgatggggtgagtgaaggttgcacgcaattaggaatcatttatgaaaacgggcaaggcactagaatagattataaaaaagccctagaatattataaaaccgcatgccaggctgatgatagggaagggtgttttggtttaggggggctttatgatgaggggttaggcacgactcaaaattatcaagaagccattgacgcttatgctaaggcgtgcgttttaaaacaccctgagagttgctacaatttaggcattatttatgaccgaaaaatcaaaggcaatgccgatcaagcggttacctactaccaaaaaagctgtaattttgatatggctaaggggtgttatgttttgggcgtggcttatgaaaaaggctttttagaagtcaaacaaagcaaccataaagccgtcatctattatttgaaagcatgccgattggatgatgggcaggcttgtcgcgcgttagggagtttgtttgaaaatggcgatgcagggcttgatgaagattttgaagtggcgtttgattacttgcaaaaagcttgcgggttaaacaattctggtggttgcgcgagtttaggctctatgtatatgttaggcaggtatgtcaaaaaagatccccaaaaggcttttaattttttcaaacaagcatgcgatatggggagtgcggtgagttgctctaggatgggctttatgtattcccaaggggacgctgttccaaaagacttgaggaaagcccttgataattatgaaaggggttgcgatatgggcgatgaagtgggttgcttcgctctagcgggcatgtattacaacatgaaagacaaagaaaacgccataatgatttatgacaagggctgtaagctaggcatgaaacaagcatgcgaaaacctcactaaacttagggggtat

SEQ ID NO: 27 - DNA, 1347 bp, Artificial Sequence
  Description of Artificial Sequence:  Synthetic Primer
atggagttagaaactcatttgtcaaaatatttcaccctagcctttacgcataaaagcatgagcttagaaatgcgagaaaaactcgctattaattcgaatgcaacgcttaaagaatttttacaaaccattaaaaaccattgccctaacatcaaagagtgcatggtgttatccacatgcaatcgctttgaaatctatgcgagcctaaaacacggcgctaatactaatgaacaaaaaaacgcactattaaagattttggctcaaaataaaaaaatgagcgtgtctgatttagaaaaatgcgttttaatgaacactgatgaaagcgcagtccatcatgtctttagcgtgtgcagcagtttggatagcttggtggttggggaaactcaaatcacagggcagatgaaaaacgcttataaattcgcttttgaagagaaattttgctctaaagatttaacccgattgctccattttgctttcaaatgcgccgctaaagtgcgcaatttaaccggcatttccaagcaaggggtttccatctcttcagtggcggtcaaagaagcgcttaatatttttgaaaaagaaaggattaaggataaaaaagcccttgtgatagggcttggcgagatggctcaattagtcatcaagcaccttttaaacaagcaatttgaagcgcttatcttagggcgtaatgcggctaaatttgaagatttcatcaaagaattagaagaacctaaaaaagtaagctttcaaaatatagaaaatttaaacgcttatatcaatgaatacgaactgcttttttgcgccacttcttcgccgcattttatcgtgcaaaatcgcatgttaaaagaaacgattttcaggcgtttttggtttgatttagccgtgccacggaatattgaaaagccggtattggataatattttcttatacagcgttgatgatttagagcctatggtgagagaaaatgtggaaaacaggcaagagagcagaatgagagcttatgagattgtagggcttgccacaatggagttttaccaatggattcaaagtttagaagtagagcctgtgattaaggatttaagggaattggctaggatttcagcccaaaaagaattgcaaaaagcgcttaaaaaacgctatgtgcctaaagaatacgaaaacaacattgaaaagatcttgcacaacgctttcaacacttttttgcataaccctaccatcgccttaaaaaagaacgctcaaaaagaagaatccgatgtgcttgtgggtgcgattaaaaacttgtttaatttagacaaatctaacgctaaccatgcccagaatttgaatctctataaatgcgaatattacgaggaa

SEQ ID NO: 28 - DNA, 1044 bp, Artificial Sequence
  Description of Artificial Sequence:  Synthetic Primer
atgttcattgtagcggttttgatgctggcgtttttaatctttgtccatgaattagggcatttcactatcgctaggatttgtggggtgaaggtagaagtctttagcattggttttggtaaaaaactctgtttttttaagctttttggcacgcaattcgctttgtctttgatcccgcttgggggctatgtgaaattaaagggcatggataaagaagaaaatgggatgaatgaaaccacggatgacagctatgcgcaaaaaagcccttttcaaaagctatggatactatttgggggggcgttttttaattttctttttgcgattttagtgtatttttttctggcattgggtggggaaaaagtcttactgcccgtcattggcgatttagacaaaaacgcgctagaagctgggctattaaagggggataaaatcctttctatcaaccataaaaaaatagcgagttttagagagattagaagcgtagtggcgcgtgctagaggcgagttggttttagaaatagagcgaaaccatcaggttttagaaaaacgactgacccccaaaatcgtagcggtaataagcgattctaatgatcctaatgaaatgatccggtataaagcgataggcatcaagccagacatgcaaaaaatgggcgttgtttcttattctttgtttcaagcgtttgaaaaggccttgagtcggtttaaagagggcgttgttttgatcgtggattctttaaggcgtttgattatgggaagctcttcagttaaggaattgagcggggtggtaggcattgtgggagcgttaagccatgccaatagtttgagcatgcttttgttgtttggggcgtttttgtccatcaatttagggattttaaacttactacccattccagccttagatggggcgcaaatgctaggggttgtttttaaaaatatttttcatatcactttgccaacacccatacaaaatgcgttgtggctagcgggggtggggtttttggtttttatcatgtttttagggcttttcaatgatctcactcgtttgcta

SEQ ID NO: 29 - DNA, 1134 bp, Artificial Sequence
  Description of Artificial Sequence:  Synthetic Primer
atgctgttaaaaaacgcttcgttttatgatgatgaagttttaaaaagagcggatatccgcttaaaagattccctcattacagagattaaagaaaacttaagccctattaataatgaagaagtgattgagtgcagggatttattcgtgctgccaagcttcattgatttgagcgttactggtttggagggttatgaaaatttaaaacaaaaggcttttaaagggggggtagggttactcaatgtttttaattgcgatcaaagcggcattaaaaacatcatggcaattaaaaacaaccaactagctgacatcgccacgcttaaaaataaagggggggaaattttaatcgcgccatctgacgcttttttagaactcattagccactacgccaaatcctacaacttgcctcttttaatctctttagaaaattcttttgaagccctaaatagtggggaattagcctatgaattggggcaaaattttgtggaaaatgcgtttgaaaacacgcgcttggtgcgtttcatggaagtttctagagcgttacaaatccctgtgcttttagataaagtgaatagtatcaccacgctcaaactcatcaaagcctttaatgatttaggggcgaaattacaagcccaaacgcccttaagccatttagttttagatgagagcgtgtatgaagattatgagccacgatttaaaatcgctcctcctttaagggataaagaaagccaaaacgccctaaaagaagccctaaaaaataacgaaatcgccatgctcacaagccttcatgcttctaaaaattctaacgcacagctttttgaagaaagcgcttttgggtgtgagagcatagaggacgcttttagcgtggcttatacttttttagttcaaaaaaaggttatcagcttccaacaactcattaaagtcatggcgattaaccaagcgaagtttttaaaactcaatgcaggcgaggttaaagaaaaccaattagccaatttgatgatcgtggatttaaacgctcaaacaagagtgagtaatcaaaattcgcccttttatggtttggaattgtatggcgaagtgcaaagaatgatcttaaaagggcaaaccacatttattaaggagaatgcatgcaagaaatca

SEQ ID NO: 30 - DNA, 1020 bp, Artificial Sequence
  Description of Artificial Sequence:  Synthetic Primer
ttgaaaatagcgattgtcaggctttcagcgcttggggatattatcgtgagcgcggtgtttttggcggtgattaaagagtgtctgcctaacgcccaaatagaatggttcgtggatgaaagatttagtgcgattttagagcattccccctatattgataaattacaccccatcgctttaaaaagtgcactcaaaaccttgaatcctttgaagattttcaaactttttaaatctttaagggcttatgaatacgatataatcattgacatgcaaggcctagtcaaatccgctctcatcacgcaaatgttgaaagcccctaaaaaagtcggctttgattacgcttcggctagagagggtttgagcatgtttttttactcgcaaaaagtttctatcgcttatgatgagcctgttttaaagcgcaatttcacgctcctttctcatgccctaaacttgccccaaaaagaaatttcaaaagaaatttcagagagcttaagctctagggctaaagcgttttcttaccagccttctccaaaaattgatgcgttaaatttgaataagaataagccaaaaatcctttttattttagaaacttctaaaatcaataaaacttaccccatagagcgttttaaagaattagcgttaattttagaaaattttcaaatttgcttgttatggcatgctgatgaatataaagccactacgctttatcacgctttaaaacaccaacgcgatgtgttattgctccccaaactcactttaaacgaggttaaggcgttgctctttaaaatggatttgattattgggggcgatacgggcatcacgcatttagcatgggcgttgcaaaaacccagcatcaccctttatggcaacacgcccatggagcgttttaaattagaaagcccgatcaatgtttcgctcaccggtaattcaaacgccaactaccataaaaaggatttttctatccaaaatatagagcctaaaaaaattaaagaatgcgttttaaacatcttaaaggaaaaagaa

SEQ ID NO: 31 - DNA, 8679 bp, Artificial Sequence
  Description of Artificial Sequence:  Synthetic Primer
atgaaaaagtttaaaaagaaaccaaaaagtatcaaacgatcgcatcaaaatcaaaaaacaatcttaaagcgtcctttatggcttatgcctttactcatcagcgggtttgctagtggggtgtatgcgaataatctgtgggatttgttaaacccaaaagtggggggtgagtatgtgcattgggttaagggcagtcagtattgtgcatggtgggaatttgctgggtgtttaaagaatgtatggggggcaaatcataaaggctatgatgctggaaacgccgctaactatttgtcttctcaaaactatcaagctatttcggtgggtagtgggaatgaaacggggacttatagtttaagcggttttaccaattatgttgggggcaatctcacgatcaatctaggcaatagcgttgttttagatttaagcggttctaatagtttcacttcgtatcaaggttataatcaaggcaaagatgatgtaacatttacggttggcgcaatcaatttaaacggcactttagaagtgggtaatcgtgtgggatcgggagctggcacgcacaccggcacagccactttaaacttgaacgctaataaggtcaatatcaattccaatatcaacgcgtataaaacttcgcaagtgaatataggcaacgctaacagcgttattaccattggttcggtttctttgagtggggatgtttgcagttctttagctagcgttgggataggggctaattgctccacttctgggcctagctattcttttaaagggacgactaacgctactaacacggcgtttagtaatgcaagcggcagtttcacttttgaagagaacgccacttttagcggggcgaaatggaatggggggacttatacctttaataaagagtttagcgctaccaataacaccgcctttagtagcggtagttttaattttaaaggtgtaagctcttttaatggtacttcgtttagtaacgcttcttatacttttgacaatcaagccactttccaaaacagctcctttaatggggggacttttacttttaataaccaaactaatccaactaacaacgctcagcacccccaaattcaaaacagctcttttagtggtaacgctaccactcttaagggctttgtgaatttccagcaagcctttaacaattcaaaccaccaactaacgatccaaaacgcttcctttaataacgccacttttaacaataccggtaaaatcactatagaaaaagatgcgagttttaataacacgacattcaacacttctgttgatacaaacaacatgagtgttaccggtggcgttactttaagcggtaaaaatgacttgaaaaatggctcaacccttgattttgggagttctaaaatcactctcgctcaagggacgactttcaacctcacaagtttaggcagtgagaagagcgtaacgattttaaattctagcggtgggatcacttatagtaaccttttaaaccatgcaatcaacggcttgacaagtgccttaaaaacgaacgaaagcctttcaaatccgcaaagtttcgctcaaggtttgtgggatataatcacttacaatggggttaccgggcagcttttgaatgaaaacgctgcaacatctaaacccactgactcttcgccctctaaatcctctacaaactctacgcaagtctatcaagtgggttacaaaataggggatactatctacaaactgcaagaaactttcagccacaattccattattattcaggctttagagagcgggacttacacgccaccccctgtcattaacggctccaaatttgacttatccgcttcaaattatatcaatgctgacatgccttggtatgaccataaatattacatccctaaatcccaaaattttacagagagcgggacttattacttgccgagcgtccaaatatgggggagctacactaactcgtttaaacaaacttttagcgcaaatggtagtaatctggtgattgggtataactcaacatggactgatcataatgtctcttctagcggcacggtgtcttttggggacacttcagggagcgctcttaatgggcattgcggaccttggccgtattaccaatgcacaggcacgactaacggcacttatagcgcctatcatgtgtatatcacagcgaatctgcgttctggcaatcgtataggcaccggtggggcagctaatctaatctttaatggggtagatagtatcaatatcgctaacgctaccatcacgcaacataacgccggaatctattcaagctctatgactttttccacgcaaagcatggataattcgcagaatttgaatggtctaaattctaacggcaaactttcggtgtatggcaccactttcactaacgaagctaaagatgggaaattcattttcaatgcagggcaagcggtttttgaaaacaccaactttaatggagggagttaccaattcagcggcgatagcttgaatttttcaaacaacaaccagttcaatagcggttcgtttgaaattagcgcaaaaaacgcttcgttcaataacgctaactttaacaacagcgcttcttttaatttcaataattctaacgcgaccacttcgtttgtgggggatttcactaacgctaattcaaatttgcaaatcgccgggaacgctgtttttgggaactctactaatggctctcaaaataccgctaattttaataataccggctctgttaatatttcagggaatgcaacctttgataatgtggtgtttaatggccctacgaacacgagcgtgaaagggcaggttactttaaataacatcactttaaaaaacctgaacgcccctttgtcttttggcgatgggacgattacttttaacgctcattcggtgattaatattgctgaatctatcactaatggcaaccctatcactcttgtaagctcttctaaagaaattgaatacaacaacgctttcagtaaaaatctatggcagctcatcaactaccaagggcatggggcaagcagtgaaaagctcgtctctagcgcgggtaatggcgtttatgatgtggtgtattctttcaataaccaaacctacaatttccaagaggttttttcacaaaacagcatttctatccggcgtttgggcgttaacatggtgtttgattatgtggatatggaaaaatcggatcatttatattatcaaaacgctctcggttttatgacctacatgcctaatagctataacaataatttagggaatgcaaacaacaccatttactattacgacaagagcattgatttttatgcgagcgggaaaactctattcactaaagcggaattttctcaaacattcaccgggcaaaacagcgcgatcgtttttggggctaaaagcatatggacgagcttaagcgatgcaccgcagtctaacaccatcattcgctttggggacaataagggagcagggagtaatgatgcgagcgggcattgctggaatttgcaatgcataggctttattacagggcattatgaagcgcaaaagatttacatcaccggtagcattgaaagcgggaatcgcatttctagcggtgggggcgcgagccttaattttaacgggcttcaaggcattcttttaacgaacgcgactttgtataaccgcgccgctggcacgcaaagctcgtctatgaattttatctctaacagcgcgaacattcaggctcaaaactcctattttatagacgataccgcacaaaatggcggtaaccctaatttcagtttcaacgctttgaatctggatttttctaacagctcttttagaggctatgtggggaaaacgcaatctgtttttaaattcaatgccaagaatgcgatcagtttcaccaacagcacgaatttaagctctggtttgtatcaaatgcaagctaaaagcgtgttgtttgacaattccaatttaagcgtttcagtggggacaagcagtattaaagccaatgcgatcaatctttctcaaaatgcctctattaatgcgagcaaccattcaaccttagaacttcaaggcgatttgaatgtgaacgacaccagctcgctcaacctcaaccaaagcacgattaatgtttccaataacgccacgatcaacgattatgcgagcttgattgcgagtaatggctctcaccttaattttaacggggcggttaatttcaattcagcgaatattactacgagtttgaataattcctctatcgtgtttaagggggcggtctctttaggagggcagtttaatttaagcaataactcttctttagatttccaaggctctagcgctatcacctctaacacggcgtttaatttctatgataacgctttttctcaaagccccatcactttccatcaagcccttgacattaaagcgcccttaagtttgggaggcaaccttttaaaccctaacaacagcagcgtgctggatttaaaaaacagccagcttgtttttggcgatcaagggagtttgaatatcgctaacattgatttactaagcgatctaaatgataataaaaatcgtgtgtataacatcattcaagcggacatgaatagtaattggtatgagcgtatcagcttctttggcatgcacatcaatgacgggatttatgatgctaaaaaccaaacttatagtttcactaacccccttaataacgccctaaaaatcaccgagagctttaaagacaaccaactaagcgttacgctctctcaaatcccgggtattaaaaacacgctctataacattggctctgaaatttttaactaccaaaaagtttataacaacgctaatggcgtgtattcttatagcgatgatgcacaaggcgtgttttatctcacaagcaacgtgaaaggctattacaaccctaaccaatcctatcaagccagcggcagtaacaacaccacgaaaaataataatctaacctctgaatcttctatcatctcgcaaacctataacgcgcaaggcaaccctattagcgcgttgcacatctataacaagggctataatttcaacaatatcaaagcgttagggcaaatggctctcaaactctaccctgaaatcaaaaaggtattagggaatgatttttcgccctcaagtttgaacgctttaaactctaatgcgctaaaccaacttaccaaactcatcacgcctaacgactggaaaaacattaacgagttgattgataacgcaaacaattcggtggtgcaaaatttcaataacggcactttgattgtgggagcgactcaaatagggcaaacagacaccaatagcgcggttgtttttgggggcttgggctatcaaacaccttgtgattatactgatattgtgtgccaaaaatttagaggcacttatttaggacagcttttagagtccagctcggctgatttgggctatattgacacgacttttaacgctaaagaaatttatcttaccggcactttagggagcgggaacgcatgggggactggggggagcgcgagcgtaacttttaacagccaaacttcgctcattctcaatcaggctaatatcgtaagctcgcaaaccgatgggatctttagcatgctgggtcaagagggtattaataaggttttcaatcaagccgggctcgctaatattttgggcgaagtggcggtgcaatccatcaacaaagccgggggattagggaatttgatagtaaatacgctagggagtaatagcgtgattggggggtatttaacgcctgaacaaaaaaatcaaaccctaagccagcttttagggcagaataactttgataatctcatgaacgatagcggtttgaatacggcgattaaggatttgatcagacaaaaattaggcttttggaccgggctagtggggggattagccggactagggggcattgatttgcaaaaccctgaaaagcttataggcagcatgtcaatcaatgatttattgagtaaaaaagggttgttcaatcagatcaccggctttatttccgctaacgatatagggcaagtcataagcgtaatgttgcaagatattgtcaaaccgagcaacgctttaaaaaacgatgtagcggctttaggcaagcaaatgattggcgaatttttaggccaagacacgctcaattctttagaaagcttgttgcaaaaccagcagattaaaagcgttttagacaaagtcctagcggctaaaggtttagggcctatttatgaacaaggcttgggggatttgatacctaatcttggtaaaaaagggcttttcgctccttatggcttgagtcaagtgtggcaaaaaggggattttagtttcaacgcacaaggcaatgtttttgtgcaaaattccactttctctaacgccaatggaggcacgctctcttttaacgcaggaaattcgctcatttttgccggaaacaatcatattgcattcactaaccacgctggaactcttcaattattgtccgatcaagtttctaacattaacatcaccacgcttaacgctagcaacggccttaagattaacgccgctaataacaatgtttctgtgtctcaaggcaatctgtttgtcagcgctagctgcgcgcaacaaagcgatccaactacagctaatattgcaaacccttgcgcgcttagcgcccaaagcacgaatggcgcttcttctaataatgcgtcaaataacgcgccaatcgccttgagtaataacgatgaaagcttgatggttgcggcgaatgatttcaatttttcaggcaatatttacgctaatggggtggttgatttttcaaagattaaaggctctgcaaacattaaaaacctgtatctttacaataacgctcaattccaagccaacaatctcactatttccaatcaagcggtgttagaaaaaaacgccagctttgtaacgaataatttaaacattcaaggagcgtttaacaacaacgccacgcaaaaaatagaggtgcttcaaaatttagtgatcgcttcaaacgcttctttaagcaccgggatttatgggttagaagtagggggggctttgaataattctggagcgatccattttaatttagaaaatacccaaacgccaacgccgctcattcaagcagaggggatcattaacctcaacaccacccaaacgccttttatgaatgtcaataacagcatggccaataatacgacttacactttattaaaaagcagccgttacattgattacaatatcaaccccaacagcttgcaatcgtatttgaatctctacactttaatcaatatcaacgggaaccacatagaggaaaaaaacggcgcattgacttatttgggccaacgggttttgttgcaagataaggggttattgttaagcgtagcgctgcccaactcaaacaacgcttctcaaaacaacattttaagcctttctgtcctttataaccaagttaaaatgtcttgcggcgataaagcgatggattttaccccccctaccttacaagattacattgtgggcattcaagggcaaagcgcgctcaatcaaattgaagctgttggggggaacgctatcaagtggctttcaacattgatgatggagactaaagaaaacccgttttttgcgccgatttatttaaaaaaccactctttgaatgaaatcttaggcgtaacaaaagatcttcaaaacaccgcaagcttgatttctaaccctaattttagagataacgctaccaatcttttagaattggcgagttacacccaacaaaccagccgtttaacaaaactctctgattttagatctagagagggagagtctgatttttctttgttagagcttaaaaacaagcgttttagcgatcctaatccagaggtttttgtcaaatactctcaacttagcaaacacccaaataacctttgggttcaaggggtgggaggagcgagctttatttctgggggcaatggcacgctttatggcttgaatgcgggctatgacaggttggttaaaaatgtgatccttgggggttatgtggcttatggctatagcgactttaatgggaacatcatgcattctttgggtaataatgtggatgtggggatgtatgcgagggcttttttaaaaaggaacgaattcactttgagcgcgaatgaaacttatggaggcaatgcaactagtatcaattcttctaattctttgctctctgtgttgaaccaacgctacaactacaacacctggacaacgagcgtgaacgggaattacggctatgatttcatgttcaaacaaaaaagcgtggtgctaaaacctcaagtgggtttgagctatcatttcataggtctaagtgggatgaaaggcaatgatgccgcttacaaacaattcctcatgcattcaaacccctctaacgaatcggttttaacgctcaacatggggttggagagccgtaaatattttggtaaaaattcctattattttgtaacggcgagactaggtagggatcttttgatcaaatctaaaggcagcaatacggtgcgttttgtgggcgaaaacactttattgtatcgcaagggggaagtttttaacacttttgcgagcgtgattacagggggcgaaatgcatttgtggcgtttggtgtatgtgaatgcgggggtggggcttaagatgggcttgcaataccaagatattaatataaccgggaatgtgggcatgcgagtggcgttt

SEQ ID NO: 32 - DNA, 870 bp, Artificial Sequence
  Description of Artificial Sequence:  Synthetic Primer
atgtttgaaaaaattaccctagcgcataaggacttgttttcaaggtttttaagcgctcaaaaaatcgttttatcagatgtgagttttacgaattgctttttatggcagcacgcaaggctcattcaagtggcggtgattagggattgtttggtgattcaaaccacttatgaaaatcaaaaacccttttatttctatcctatcggtaagaatgcgtttgaatgcgtaaaagagcttttgaaattagaaaaaaatttaagattccactccctgactttagagcaaaaagacgatttgaaagacaattttgtaggggtgtttgatttcacttacaaccgagacaggagcgattacgtttattctattgaagaattgatcgctttaaaagggaaaaaataccataagaaaaaaaaccacctaaaccagtttttaaccaatcatgcgaattttgtttatgaaaaaatttctcctcaaaataaaaaggaagttttagaagcttctcaagcgtggtttttagaaagccaaaccgatgatatagggctaatcaatgaaaataagggcattcaaagcgtgttagaaaattatgaaagcttggatgtaaagggggggcttattagggttaatggggaaatagcctcgtttagttttggagaagttttaaacgaagagagcgcgctcatccacattgaaaaagcccgcacagatattgcaggcgcgtatcagatcatcaaccagcagttgcttttgaatgaatttagtcatttaacttacgctaacagagaagaagatctaggattagagggtttaagaaggtctaaaatgagctataacccggtgtttttgatagacaaatacgaagccgttgctaaaaat

SEQ ID NO: 33 - DNA, 2484 bp, Artificial Sequence
  Description of Artificial Sequence:  Synthetic Primer
atgcgcgttacctttggctcaaaatacaaccaaatgaataactaccaaaacgctttacaaaataaaatcaacgacgctaacacgcagatcgcttcagggctaaaaatccgttatggttatcaaaacagcgacattaacaaccagaatttaaaattccaatacgaagaaaacaccttagatcaaggcattgatgtggcgcaaaacgcttacacttcaacgctcaataccgacaaagccttgcaagaattttctaaaacgatggaggcgtttaaaaccaaactcatccaatccgctaacgatgtgcattcagaaacttctcgcgccgctatcgctaacgatttagaacgcttaaaagagcatatgataaatgtcgctaacacttctatagggggggaatttttatttgggggcagtaaggtggatagaccccccattgatagtaatgggaaataccatggcaatggcgaagatttaaacgtgcttattagctctgataaccttgtgccttataatatcagcgggcaagatttgtttttaggcaccgataaagacaaacacaaactcattaccaccaacattaaattattcaatcaaaacaagctccaccctgatgtgatggacgctttagagcattcttcattgcctgaggaagtttttattaaacccagcgataccttgcgagaactcatcggcgataacgataaagaccccaccaatgaccctaaagagtttttttatttgcaaggcgttaggcctgatggctccagttttaaagaaaaattcgcgttggataaagcctatcaaaaccaagagagtgcctctaaagtgagcgatttgttggataaaatcgctcacgcttacgggaacacttcgcaaaataaagtcgtggatgtgagtttgaacaattgggggcaaattgagatcaaaaacctaacccccggcagtgaaaatttggattttcatttgatttctagcgatggggattttgacgatttagacgccttgcgttcgagcggtaaaagggttactgaatacatcaaaagtgcgtttgtaacggataggagtttgagccaagttaaagcggtgcctaacatgtataatcccaaggtgcttgaagtccctagcgtgtttgtcactaaagacaatgttttagccaacaaaaacactaaattgagcgagatttttggcgatagcgtggaaactttaaaaatcaatgccagccgtttggacgaaacaagcgctattaaaatcccaaacctccctgtttatttggacattcccattcttttagacgtgaaaaattctacgattaaagatttgaaagacgcgatcaaaaaacgcttcaataatgaagtggatgtggaaattgaaacaaacgggcgtttgaggattattgacaattcttctaaagaatcgcctatttctttggctttaagcgccctagatgctaaaggactagaagtggccggtatccctactaataacgcgagcgaataccaaaaaacctacttcaataaagaaggggcaaaattagaaagcaatgtcgctcaaaccgctcaaaatggcgcagctaatggctctactaaactgagtgaagccgctaaggggagtttagaaaatagcgtttttaacatgaaattaaacgatgtgaatggcttatttttggaagcgcaaatgaacttggataataatggggcttttttgagcctccctaatggcattaaaatcccgctttatgaccccacaagcgctgatattcaagcgtctaaacccaatgaagtcacttacaggcaacttatggatgcgatgagtatcgcgctcaattacagcaatactgacccagccatctaccaacaaatcagcgataaccccacttccaaagaaagcaaggagcgctttattggattgttaaaacaagctaaagacaacctttctgttaatttgaatgaagagggaaaagtcattatccaagataacatgcattccaacaccaaaatgcagttcatgctttttgataaagacgcgaatgatttttctcaaaacgccttgcacagcgacaaaccaagccttaaattaaacgctaataacgctctcattattgacaagcccagcgtgaatttttttgatcaattagaaaataccatcacttctgtaagaaaagggatttatcgcccggacgctttaggggatacttattctagcgatatgcgtaatttaggcattcaaaacggcatcacccttatagatcacttgagcgatcacatagaaaaaatgatcgctaaaaacggtgctcatggcaaggcgtttgagaacattatcaggcgtaatgaagttttaaaaacgcaagttcaaagcattcgtggggaaacgaccggcacggatatggcagaaacttacaacaaattttccaatctcactaacaactataacgctgttttggcttccacgaacaaaatcaataatttgtctttaacgaaatacttg

SEQ ID NO: 34 - DNA, 1614 bp, Artificial Sequence
  Description of Artificial Sequence:  Synthetic Primer
atggatagagccaaatttatattcgttacagggggtgtgttaagctctctagggaaagggatttcatcttcttcaatcgctacgcttttacagcattgcaattaccaggtttctattttgaagatcgacccttatatcaatattgatccaggcaccatgagccctttagagcatggggaagtgtttgtaactagcgatggcgctgaaacggatttagacatagggcattatgaacgctttttgaacaggaatttaacgaggttgaataatttcactactgggcagattttttcaagcgtgatagaaaatgaaaggaaaggggaatatttaggcaaaaccattcaaatcgtcccccatgtaaccgatgaaatcaaaaggcgcattaaaagcgcggctaaggggttggattttttaatcgtggaagtgggcggaaccgtgggcgatatggagggcatgttttatttggaagcgatccgccagcttaaattggaattagggaatgaaaaagtcatcaatgtgcatgtaaccctgatcccctatatccaaaccactaacgaactaaaaaccaaacccacgcaacattccgtccaagaattaagacgccttggcgtaacccctcaaatcattttggcgcgatcgcctaagcctttggataaagagttgaaaaataaaatcgctttgagttgcgatgtggagcaagacagcgtgattgtcgccacagacactaaaagcatttacgcatgccctattcttttcttgcaagaaggcattttaacccccattgccagacgctttaatttgaataaactacaccccaaaatggcggcttggaacactttagtagaaaagattatcgctcctaaacacaaagtcaaaattggttttgtgggcaagtatttaagcttgaaagaatcttataaatccttgattgaagccctaatccatgcgggcgcgcatctggatacgcaagtcaatattgaatggctggatagcgagaattttaatgaaaagacggatttagagggcgttgatgcgattttagtgcctgggggctttggagaaagggggattgagggcaaaatttgcgccattcaaagggctaggttagaaaaactcccctttttagggatttgtttgggcatgcaattagcgatcgttgaattttgtcgcaatgttttgggtttaaaaggggctaactctacggagtttaaccaacgctgcgaataccctgtggtgtatttgattggagattttatggatcaaaaccaccaaaaacaggtgcgcacctataattcgcctttaggaggcaccatgcgattaggcgaatacgaatgcgaaattatgccaaacagcttgttagaaaaagcttataaaaagcctagcattaaagaaagacaccgccatcgttatgaaatcaaccccaaataccgccaagagtgggaaaataagggcttgaaagtggtgggttttggatcgaatcatttgattgaagcgattgaattagaagatcacccgttctttgtgggggtgcaattccacccagaattcacctccaggttgcaaagccctaaccctattattttagatttcattaagagcgctctttctaaatcc

SEQ ID NO: 35 - DNA, 1701 bp, Artificial Sequence
  Description of Artificial Sequence:  Synthetic Primer
ttggatttaaaggtattattgcaacggattgttgattttttcatcaagctcaataaaaagcaaaaaatcgccctgattgcagctggggttttgatcacggctttgcttgtgtttttattgctctatccctttaaagaaaaagactacacgcaagggggttatggggttttatttgaaggtttagactctagcgataacgctttaatcttacagcacctccagcaaaaccaaatcccttataaagtctcaaaggacgacaccatccttatccctaaagataaagtgtatgaagaaaggatcactctggcttctcaagggatccctaaaacgagtaaagtgggctttgaaatctttgacactaaagactttggagcgactgattttgatcaaaatatcaaactcattcgcgccattgagggggaattgtcgcgcacgattgaaagtttaaaccccattttgaaagccaatgtgcatattgcaatccctaaagacagcgtgtttgtggctaaagaagtccctcctagcgcttcggtgatgctcaaactcaagcctgacatgaagctttcacccactcaaattttagggattaaaaatttaatcgctgcagctgtgcctaaactcacgatagaaaatgtgaaaatcgtgaatgaaaatggcgaatcaataggcgaaggcgatatactagaaaactccaaagaattagccctagagcaattgcattacaaacaaaattttgaaaacattctagaaaataagattgtcaatatcttagcccctattgtggggggtaaaaacaaggtggttgcaagggtcaatgcagagtttgatttcagccaaaagaaaagcactaaagagacttttgatcccaataatgtcgtaaggagcgagcaaaatttagaagaaaaaaaagaaggcgcttctaaaaaacaagtcggtggcgtgcctggggttgtgagcaatatcgggcctgtgcaaggattgaaagacaataaagagccagaaaaatacgaaaagtctcaaaacacaaccaattatgaagtgggtaaaaccattagcgagattaagggcgagtttggcactttagtgcgtttgaatgcggcggttgtggtggatggcaagtataaaatcgcgcttaaagatggggtaaacactttagaatacgagcctttgagcgatgaatcgcttcaaaaaatcaacgctctagtcaaacaagccattggctataatcaaaatagaggcgatgatgtggcggtgagcaattttgagtttaaccctatggcacctgtgattgataacgctactttgagcgaaaaaatcatgcacaaaactcaaaaaatcttaggctcattcacgcccttaatcaagtatattttagtgtttatagtgctatttattttctataaaaaagtgattgtgcctttcagcgaacgcatgctagaagtggtgcctgatgaagataaggaagtgaaatccatgtttgaagaaatggatgaagaagaagatgaattgaacaaactgggcgatttgaggaaaaaagtagaagatcaattagggcttaatgcaagctttagcgaagaagaagtaagatacgaaatcatcttagaaaagattagagggactcttaaagaacgccctgatgaaatcgcaatgctctttaaactcctaatcaaagatgaaatctcttcagacggcgcgaaaggt

SEQ ID NO: 36 - DNA, 1344 bp, Artificial Sequence
  Description of Artificial Sequence:  Synthetic Primer
atgtatgttgaaaaaattctccagtctttacagaaaaaatacccttatcaaaaagagttccatcaagccgtctatgaagctatcacttctttaaaaccccttttagacagcgataaaagttatgaaaagcatgcgattttagagcgtttgattgagcctgaaagggagattttttttagggtgtgttggctagatgataacaatcaaatccaagtcaatcgggggtgtagggttgagtttaattcggctattggcccttataaggggggtttgagattccaccctagcgtgaatgaaagcgtgatcaagtttttaggctttgagcaagtgttgaaaaattcgctcaccactttggctatggggggcgctaagggggggagcgattttgaccctaaagggaagagcgagcatgagatcatgcgtttttgccaagcgttcatgaatgaattataccgccatattggagccacgactgatgtgccagctggggatattggagtgggcgaaagagagattggctatctgtttgggcaatacaaaaaattagtcaatcgttttgagggcgtattgaccggtaaaggactcacttatggagggagcttgtgcagaaaagaagctaccggttatgggtgcgtgtattttgctgaagaaatgttgcaagaaaggaacagctctttagagggtaaggtttgcagcgtttctgggagcgggaatgtcgcaatttataccattgaaaaattgcttcaaataggagctaaaccggtaacggcgagcgattctaatggcatgatttatgacaaagacggcattgatttagagcttttgaaagaaattaaagaagtgcgtcgtgggaggatcaaagaatacgctttagaaaaaaagagcgcggaatacaccccaacagaaaattaccccaaaggggggaatgcggtgtggcatgtgccttgttttgcggcttttcctagtgcgaccgagaatgaattgagcgttttagacgccaaaaccctcctttctaatgggtgtaaatgcgtggctgaaggggcgaacatgccctcaagcaatgaagcgattggattgtttttgcaggctaagatttcttatggtataggcaaggcggctaatgctgggggggtgagcgtgagcggcttggaaatggcacaaaacgcaagcatgcacccttggagttttgaagtggtggatgcgaaattgcaccatattatgaaagagatttataagaatgtctctcaaaccgctaaagagtttaaagaccctactaattttgtattaggggccaatatcgctggttttagaaaagtagcgtctgcgatgatagcgcaaggggtt

SEQ ID NO: 37 - DNA, 2409 bp, Artificial Sequence
  Description of Artificial Sequence:  Synthetic Primer
atggatgatttgcaagaaataatggaagacttcttgattgaagcctttgaaatgaacgagcaattggatcaggatttagtggaattggagcataaccctgaggatttggacttgctcaatcgcatttttagagtcgcccacaccattaaaggctctagctcgtttttgaatcttaacattctcacgcacctcacgcacaacatggaagatgtcttgaatcgcgccagaaagggcgaaatcaaaatcacgcctgatattatggatgtcgtgttgcgctccattgatttgatgaaaaccttgctcgtaacgattagagataccggctctgatactaataacggcaaggaaaacgagattgaagaagcggtcaaacaacttcaagccatcacgagtcaaaatttagagagtgctaaagaaaggactacagaagccccccaaaaagaaaataaagaagagacgaaagaagaagcgaaagaagaaaataaagaaaacaaggcaaaagcccctactgcagaaaacacatcaagcgataacccgctagccgatgagccggatttggattacgctaacatgagcgctgaagaagtggaagcagagattgaacggctgctgaacaaacgccaagaagccgataaagaacgaagagctcaaaaaaaacaagaagccaaacccaaacaagaagttaccccaacaaaagaaacccccaaagcccctaaaaccgaaactaaagctaaggctaaagccgatactgaagaaaataaagccccctctattggcgtggagcaaaccgttagggtggatgtgcgccgcttggatcacttgatgaatttaatcggcgagcttgtgttagggaagaatcgcttgatcaggatttatagcgatgtggaagaacgctatgatggggaaaagtttttagaggaattaaaccaggtggtctcttctatttcagcggtaacgacagacttgcagcttgcggtgatgaaaacacggatgcaaccagtgggtaaggtgttcaataaattccctcgcatggtaagggatttgagccgggaattaggcaagagcattgaattgatcattgagggcgaagaaaccgaattagacaaatccattgtagaagagattggcgatccgctcattcacattatccgcaactcatgcgatcatgggattgagcctttagaagaaagacgaaagcttaacaagcctgaaaccggtaaagtgcaattgagcgcgtataatgagggtaaccacattgtgattaaaatctctgatgatggcaaagggttagaccctgtgatgcttaaagaaaaagcgattgaaaaaggggtgattagcgaaagagacgctgaaggcatgagcgatagggaagcgtttaacctcattttcaagccaggcttttctaccgcaaaagtcgtttccaatgtctcaggcaggggtgttggcatggatgtggtgaaaaccaatattgaaaagctcaatgggatcattgaaattgattcagaagtgggggtaggcacgactcaaaagcttaaaatccctctcactttggctatcattcaagctttactcgtgggcgttcaagaagaatattacgctatcccgctttcttcagtgttagaaaccgtgcgcatcagccaggatgaaatttacaccgttgatggcaagagcgtgttgcgtttgagagatgaggtgctttctttggtgcgcctttctgatatttttaaagtagatgctattttggaatccaactcagatgtgtatgtggttatcattggcttggctgatcaaaaaattggcgtgatcgtggattatttaatcggtcaagaagaagtggtcattaaatctttaggttactatcttaaaaacactagaggcattgctggtgctacggtgagaggcgatgggaaaatcacccttattgtagatgtgggggcgatgatggatatggcaaaaagcatcaaggtcaatatcactaccttaatgaacgaatccgaaaacacgaagagcaaaaattcccctagcgattatattgtcttagcgattgatgacagcagcacggatagagcgattatccgcaaatgtttaaaaccattaggcatcacgcttttagaggcgactaacgggttagagggcttagaaatgcttaaaaatggcgataagattccggacgctattttagtggatattgaaatgcctaaaatggacggctacactttcgcttctgaagtgcgtaaatacaataaattcaaaaacctgcctttgatcgcagtaaccagtcgggtaactaaaaccgataggatgcgtggcgttgaatccggcatgactgaatacatcaccaaaccttatagcggtgaatatttaaccaccgtagtgaagcgcagcattaaattagaaggagaccaatcg

SEQ ID NO: 38 - DNA, 1287 bp, Artificial Sequence
  Description of Artificial Sequence:  Synthetic Primer
gtgatagagcttgacattaacgctagcgataaatcgctctcacacagagccgttatttttagcctgctcgctcaaaaaccttgtttcgtgcggaattttttaatgggagaagattgtttaagctctttagaaatcgctcaaaatttaggggctaaagtggaaaataccgccaaaaattcttttaaaatcacacccccaacaactataaaggagcctaacaagattttaaattgcaacaattctggcacaaccatgcgtttatacagcgggcttttaagcgctcaaaaagggctttttgttttaagcggggacaattccttaaacgcacgccccatgaaaagaatcattgagcctttgaaggcttttggggcaaaaattttagggagagaggataaccatttcgcccccttagtgatcttagggagtccgttaaaagcttgccattatgaaagccctatcgcttcagctcaagtcaaaagcgcttttattttaagcgccttacaagctcaaggcgcaagcacttataaagaaagcgagcttagccgtaaccacacagaaatcatgcttaaaagtttgggagctgatattcacaatcaagacggcgttttaaaaatttcacccctagaaaaacccctagaagcctttgattttacgatagctaatgatccgtctagcgcgttttttttcgccctcgcttgcgcgattacgccaaaaagccgccttcttttaaaaaatgtcttgctcaaccccactcgcatagaagcttttgaagttttgaaaaaaatgggtgcttccatagagtatgcgattcagtccaaagatttagaaatgattggcgatatttatgtagagcatgcccctttaaaagcgatcaatattgatcaaaatatcgccagtcttattgatgaaatccccgctttaagtatcgctatgctttttgcaaaaggcaaaagcatggttaaaaacgctaaagatttacgagctaaagaaagcgacaggattaaagcggttgtttctaatttcaaagctttagggattgagtgcgaagagtttgaagatgggttttatgtagagggattagaagatataagcccattaaaacagcgcttttctaggattaagcccccccttatcaaaagcttcaatgaccacaggattgcgatgagttttgctgttttaactttagcgttgcctttagaaattgataatttagaatgcgcaaacatttctttcccgcaattcaaacacctactcaatcaattcaaaaaagggagtcttaatggaaat

SEQ ID NO: 39 - DNA, 588 bp, Artificial Sequence
  Description of Artificial Sequence:  Synthetic Primer
ttggatattttagatttgaacaaagcgcaagcggtgcaacaaaatgaacaagaggtagaggataaagagcgagagtctaaagagccggtggttttagaagatttgagcgctttagcgtggcttgaattagaagagtttagccgcctttcagggcttcctaaagaaaggattttggaattagtgaatcttggtaaaatcaagagcaaaataagcagcaacaagcttttaattgatgcgagcagcgggacaaacgctttaatcaaaaaggtagaaaatagtttgatttctatggatatgaacgggcgttctttagaacctgtgtttgtggaaaagaccattaacacgattttaaacttgcatgataaggtcattggcgctaaagatgaaacgatttcagcctttaaaaatgaaaacatgtttttaaaagacgctttaatctctatgcaagaagtctatgaagaagataaaaaaaccattgatcttttgcgcgatgaactcaatcaagcgagagaagaaattgaatttatgaagaggaaataccgcttgatgtgggggaaagtcgctgacatgagcagcgtgaataaaaag

SEQ ID NO: 40 - DNA, 1524 bp, Artificial Sequence
  Description of Artificial Sequence:  Synthetic Primer
atgattttagtattagattttgggagtcaatacacacagctgattgctagaagattgagagagagagggatttatacagaaatagtccctttttttgaaagcatagaaaacattcaaaaaaaagcccccaaaggtttgattttgagtggggggccagcgagcgtgtatgctaaagacgcttacaagcctagtgggaaaatctttgatttgaatgtgccgattttagggatttgctacggcatgcagtatttggtggatttttttgggggggtagtggttggtgcgaatgagcaagaatttggtaaggctgttttagaaatcactcaaaattctgtgatttttgaaggcgtgaagattaaaagccttgtgtggatgagccatatggataaagtcatagaactgcctaaaggctttactacccttgcaaaaagccctaattccccccattgcgcgattgaaaacggcaagatttttggcttgcaattccacccagaagtcgttcaaagcgaagaagggggtaagattttagaaaattttgcccttttagtttgcggctgtgaaaaaacttgggggatgcagcatttcgctcaaagagaaatcgcacgattgaaagaaaaaatcgctaacgctaaggttttgtgcgcggtgagtgggggcgtggattctacggtggtcgctacgctgttgcacagagccattaaggataatttgatcgctgtttttgtggatcatggcttgttgcgtaaaaatgaaaaagaaagggtgcaagcgatgtttaaggacttgaaaatccctttaaacacgatagacgctaaagaagtctttttgtctaaattaaagggcgtgagcgagcctgaattgaagcgaaaaatcatcggcgagacctttattgaagtgtttgaaaaagaagccaaaaagcaccatttaaaaggcaaaattgaatttttagcccaaggcactttataccctgatgtgattgaatccgtgagcgttaaagggccttcaaaagtgatcaaaacccatcataatgtgggcggactgcctgaatggatggattttaaactcatagagcctttaagggagttgtttaaagatgaggtgcgcttactgggtaaagaattgggcgttagtcaggattttttaatgcgccacccttttccagggcctgggcttgctgtaaggattttaggcgaaatcagtgagagtaagatcaaacgcttgcaagaagcggattttatttttatagaggaacttaaaaaagccaatttgtatgacaaggtttggcaagctttttgcgtgctgttgaatgtcaattctgtgggggttatgggggataaccgcacttatgaaaacgctatttgcttaagagcggtaaatgcgagcgatggcatgacggcgagcttttcatttttagagcattcttttttagaaaaggtttctaaccgtatcactaatgaagtgagcggtatcaatagggtggtgtatgacattacctctaaaccaccaggaacgattgaatgggaa

SEQ ID NO: 41 - DNA, 804 bp, Artificial Sequence
  Description of Artificial Sequence:  Synthetic Primer
atgaaagtcaataagggttttaaattccgcttgtatcccactaaagaacaacaagataagttgcaacactgcttttttgtctataatcaagcttataatattggcttgaatgaactgcaagagcaatatgaaaccaacaaagattcaccacctaaagaaagaaaatacaaaaaatcaagcgaattagacaatgcgatcaaacaatgcttgagagctagggacttgccctttagcgctgtgatagcccaacaagcacgcatgaatgttgaaagggctttaaaagatgcttttaaagttaaaaacagaggctttcctaaattcaaaaactctaaatccgccaaacaatctttttcgtggaacaatcaaggcttctctatcaaagagagcgatgatgagtgcttcaagacattcactctgatgaaaatgcctttactcatgcgcatgcatagaagacttccccctaattttaaagtgaaacaaattagtatctcttgcagccatagaaaatattttgttagctttagcgtggaatacgaacaagacattactcccataaaaaacactaaaaatggtgtggggctagatttgaatatccttgatacagcttgttcttgtgagataaacaaccatgacaaactaacggactttaagcaataccaaacagacatgaaagaattactagggatagaaatagatgaagagctggatactaaacgacttatccctacttattccaaattgtattctttaaaaaaatactctaaaaaatttaaaagattacaaagaaaacaaagccgtaggtgt

SEQ ID NO: 42 - DNA, 2574 bp, Artificial Sequence
  Description of Artificial Sequence:  Synthetic Primer
atgttagaaagcgcccttaaatattgcaaggaaaaagccatagaccttttagtagggtttgtgccaaaaacctattctatggcacaagagtgcaatattttaggcttgtatgatgatgctttcattattaccaaacaagaaaatctagtaggcattatatccttacaaggactaagctattctaatttaatgcaaaaagacttagagggctattttgatgctagacaaaatgttctcaacaccattagtaaagacattcaattaagaattgtggctaaaaggcgtaaggaatttatcaatcaaagtccaaatattgacaatatttatgccaaagctattatcacacaatttgaaagcaagggaatctataaaacagagtattttttagtgtttgaaactatcacttctaatgtcaagtctttctttgaaaaaaagaaattggaaatgactacttcaattaatgaagagttagaagaaagctctaaagaagataaacaagagaatgaaaatagctccaatgaaactcattcaaacacaagctctaaaaaagacaagaaaaacaagttcaaaaaaaagataacctttagcaccaaaagtaaaagagccttactcattcaaaccatagaaagagtaaaaaacgctcttaaagaatttaaacccactttactaaattctaaagaagtattaaatttctacgcagaatacatcaatggcaaatacatcgcctttaatcctaaattaaagcgattaagcgatagctatattgcatctaatgtgcattttaagaaagattactttgtcattgaatttcaaaatcaaaacaccttttgtgcgtgtgtggggattaaggcttatgagagcgaagaaatttcttcgctccctatatctactcttttacacacccaaattgaactagatttaatctttcatatccgctctttagggcaatttgaaagcctgaattttttaaaaactaagaaaaagctcacgctttctaaaatagtaaaagctgatattgataattatatagaattagtgcaagccaatcgtttgagcatgcaagagtgtgctttaaacttagttataagggctaaaagtaaagctaaattagacaagtctttaaaagagattttatccttgcttaataatgctggactaggcagtgttacagaaactatagggctaaaaccatcttatttttcattcttcccaaataacgccaatatcaaccctagaatgagacatcaaacttcccaagtcatagcatctttgattttgtttgagaaaaataatacaggttttagagcaaattcttggggggatatgcccttatctgtgtttaagaacctagaccatagcccttatttgtttaattttcataatcaagaagtcaaacataagggcgtgttagcccacaatgtcgcacgagtagtgggacataccatgattataggagcaacaggtgctggtaaaaccacactcattagctatttgatgatgagtgccttaaaatattctaacattgatattttagctcttgatagactaaatggtttgtattcctttaccaagtattttgatgggatttataatcaaggcgaaaactttcatattaaccctttttcattagaagatagcgcaactaatagagcctttttattgcatttttatgcccaaatggcaaaagtggatagttatgatgaccataaggataaagtagaagatagaacagcccttttaaatgctattgatacgatgtatagaaattataacgatgaagtcaaacaagccaaatttagcaaccaagaattaccccttccttttgatttaaaagagtttgtcaatgccattgctaaaaccaatacagacattttagatagtagttttgaagactatttaaaatcttccttattttctagccgaatggatagtctagattttaaaactcgtattagcaccataaataccgatagcattttacataatgatgatgacgctgggcttttagcctactatgtctttcataagatgattgacagagccttaaaaatcaatcgtgggtttttatgctttattgatgagtttaagtcttacgctcaaaatgaaatgatgaataaaaaaatcaatgaaatcattactcaagctagaaaggctaatggggtgattgttctagccttacaagacattaaccaactaagcgaagtgagaaacgctcaaagctttataaaaaatatggggcaattgattttgtatccccaaagaaatattgataccaaagatttaaacgataaatttggcattagactaagcgatacagaaaaacattttttagaaaacaccgccgttaatgaatacaaagtcttactcaaaaacatgaatgatggctcatctaacattatagatgtgagcctaagttctttgggtaattacctacaaatctttagctctaattctagcatggtagaacacattgataatctcattaagcattaccctaaaacttggcgagaagtctttgtgagtaacaaacacgaaaattttgatgacaaaaaacacttagaaaaggtgcttaaa

SEQ ID NO: 43 - DNA, 1797 bp, Artificial Sequence
  Description of Artificial Sequence:  Synthetic Primer
atgaaaaatattagaaatatcgctgtaatcgcgcatgttgatcatgggaaaaccactctagtagatggcttactttctcaatctggcacatttagtgagagggaaaaagtggatgaaagggtgatggatagcaatgatttggaaagagaaagagggattactatcctgtctaaaaacaccgctatttattacaaagacactaaaatcaatatcattgacactcccgggcatgctgattttgggggcgaagtggagcgcgttttaaaaatggtggatggggtgttgcttttagtggacgctcaagaaggggtcatgcctcaaactaaattcgtggttaaaaaggctttgagttttgggatttgccctattgtggtggtgaataaaattgataagcctgccgctgaaccggacagagtggtggatgaagtttttgacttgttcgtagccatgggggctagcgataagcaattggatttccctgtggtgtatgccgccgcacgagatggctatgcgatgaaaagtttagacgatgaaaagaaaaatttagagcctttgtttgaaacgattttagagcatgtgccaagccctagcgggagcgttgatgagcctttgcaaatgcaaattttcacgcttgattatgacaattatgtgggcaaaatcggtatcgctagggtgtttaatggctcggttaaaaagaatgaaagcgtgctgttgatgaaaagcgatgggagtaaagaaaatggccgtatcactaagcttataggttttttagggctggctaggactgagattgaaaacgcttatgcgggcgatattgtagcgattgccgggtttaatgcaatggatgtgggcgatagcgtcgttgatcctgctaaccccatgcctttagatcccatgcatttagaagagcctacgatgagcgtgtattttgctgtcaatgattcacccttagccgggttagaaggaaagcatgttactgctaataaattgaaagacaggctcttaaaagaaatgcaaaccaatatcgctatgaaatgcgaagaaatgggcgagggcaagtttaaagtgagtgggcgtggggaattgcaaatcactattttagctgaaaacttgcgccgtgaagggtttgaatttagcatttcacgccctgaagtcatcattaaagaagaaaatggcgttaaatgcgagccttttgagcatttagtgattgacacgccccaagattttagtggggctatcattgagagattgggcaaaagaaaagctgagatgaaagcgatgaatcccatgagtgatggctatacaagattagaatttgaaattcctgcaagagggcttatcggttataggagcgagtttttaaccgacaccaagggcgaaggcgtgatgaatcatagctttttagaattccgccctttcagcgggagcgtggaatcgcgcaaaaatggggcgctaatcagcatggaaaatggcgaagcgaccgctttttcccttttcaatatccaagaaagaggcacgctttttatcaacccccaaacgaaggtttatgtgggcatggtcattggcgagcacagccgggataatgatttagatgtcaatcctattaaatccaagcatttaaccaacatgagagcgagcgggagcgatgatgcgatcaaactcaccccgcctaggactatggtgttagaaagagcgttagaatggattgaagaagatgagattttggaagttacccccttgaatttaaggatcaggaaaaagattttagaccctaacatgaggaaaagggcgaaaaaa

SEQ ID NO: 44 - DNA, 942 bp, Artificial Sequence
  Description of Artificial Sequence:  Synthetic Primer
atgaaaaaaattggtttgagcttgtgtttggttttgagtttgggttttttaaaagcccatgaagtgagcgctgaagagattgcggatattttctacaaactcaacgccaaagagcctaaaatgaaaatcaaccacactaaggggttttgcgctaaaggcgtgttcctccctaatgcgcaagcaaaaaaggatttagatgtgccattactcaatgaaaaagaaatccctgcgtctgtaaggtattctttaggaggcgtggcaatggacgataaaagcaaagttaggggaatggcgttaaaattagaaaaccaaaacgctagctggacaatggtgatgctcaatacagaaatcaattttgccaaaaaccctaacgaattcgcccaattttttgagatgagaatccctaaaaatggcaaggtggatgaagcaagaatcaaaaagctttatgaagaagtcccctcttataggaattttgccgcttacaccaaaacgatagggatcagctcaagcgtggctaacacgccttattacagcgtgcatgcgttcaggtttaaagacaaaaaagggaagttattacccgcaagatggaaatttgtgcctaaagagggcattaagtatcttaacccccaagaattaaagcaaaaagattcaaattatctgctctctgcattccaacaacaccttaaaactaagcccatagaataccaaatgtatctggtgtttgcgaataaaaatgatgccactaacgacacgaccgcgctttggaaaggtaaacacaaggaattattggtggggaccttgaaagttgaaaaatacgaaggaatgggttgcaataaagatgtgtatttcccagctgatctccccaaaggcgtagaagcccctactgatcccttattccaaatcaggaatgaagtttatgggatcacttttagcagaaggcaa

SEQ ID NO: 45 - DNA, 1356 bp, Artificial Sequence
  Description of Artificial Sequence:  Synthetic Primer
atgttaaggcttttgataggacttcttctaatgagttttataagcttgcaatcagcctcttggcaagaacccttaagagtgagtatagaatttgtggatttgcctaaaaaaatcattcgttttccggctcatgatttgcaagtgggggagtttggttttgtcgttactaaactttcagattatgaaatcgttaattctgaagtggtcattattgccgttgaaaatggcgtcgcaacggctaaattcagagcgtttgagtctatgaaacaaaggcatttacccactccaagaatggtcgctagaaagggtgatttagtctattttaggcaattcaacaaccaagcgtttttaatcgctcctaatgatgaactctatgagcaaatcagagcgactaacaccgatattaattttattagttctgatttgttggttacttttttgaatgggtttgacccaaaaatcgctaatttaaggaaagcgtgcaacgtttatagcgtgggggtgatttatattgtaaccaccaacacgctcaatattttaagttgtgagagttttgaaattttagaaaaaagagagctggatacaagcggcgttactaaaacttccacgccgtttttttctagggttgagggtattgatgcaggcacgctagggaaacttttttcaggcagtcagtctaaaaattacttcgcttactatgacgctttagtgaagaaagaaaaacgcaaagaagtgaggattaaaaagagggaagaaaagattgattctagagaaattaaacgagaaatcaagcaagaggccattaaagagcctaaaaaagccaatcaaggcacacaaaacgctcctactttagaagagaaaaactaccaaaaagcagagcgcaaacttgatgctaaagaagaaaggcgttatttgagagatgaaaggaaaaaagccaaagccaccaaaaaggctatggaatttgaagaaagagaaaaagagcatgatgaaagggacgaacaagagactgaaggaagaagaaaagctttagaaatggataaaggcgataaaaaagaagaaagagtcaaacccaaagaaaatgagcgagaaatcaagcaagaagccattaaagagccaagtgatggaaataacgccacccaacaaggcgaaaaacaaaacgctcctaaagagaacaacgctcaaaaagaagagaataaaccaaattctaaagaagaaaaacgccgcttgaaagaagaaaagaaaaaagccaaagccgaacaaagagcgagagaatttgaacaaagagcgagagagcatcaagaaagagatgaaaaagagcttgaagagcgaagaaaggcgctagaagcgggtaaaaaa

SEQ ID NO: 46 - DNA, 828 bp, Artificial Sequence
  Description of Artificial Sequence:  Synthetic Primer
atgtttaaagatttttatcgcaccaccctctcttttttaaagcctttattgcttttactagttttattattgccgttttcactttgtatagctgatgaatatattagcataagtgatgattgggatgaaattgtgcgaaatcataagacatattattttgaaaatggtttagaccattttaatcaaggccaataccagcaagcctttaaagattttagattggcgcaagaatacagcatcgggcttggcagtgtttatttagccaaaatgtatttggagggaaagggcgtgaaagtggattacaaaaaagcacaattttatgcagaaaacgctatcaaagggtatgggagcggattgttagggggtgctcttattttaggacgcatgcaagcagaaggcttagggatgaaaaaggatttgaaacaagcgctcaagacttataggcatgtggttcgcatgttttctaataaaagcacaaattttgctaacaattttagattaccaaaccttgcggaatttactagtatgcttattggatcgcgattcattgatctttcaggtttgagcgcgaatcctataaaatttggaaagaaatttggaatacttgttaagaaatccactcaaatcaaagataagacacttctttgggaagatattgctgaaatttcaagcaatattactttactcaaacaacaaatgggggagatcctttataggattgggatcgcttataaagaagggcttggcactagaaagaaaaaggacagggctaaaaaattcctgcaaaaatccgcagaatttggctatgaaaaagccatggaagctctg

SEQ ID NO: 47 - DNA, 990 bp, Artificial Sequence
  Description of Artificial Sequence:  Synthetic Primer
atgactgaagacagattgagtgcagaagataaaaagtttctagaagtagaaagagctttaaaagaagcggcattaaatcctctaaggcatgctactgaagaactttttggtgattttttaaaaatggaaaatatcactgagatttgttacaatgggaacaaggttgtatgggttttaaaaaataatggcgaatggcaaccatttgatgtgagagacaggaaagcctttagcctgtctcgtttaatgcattttgctcggtgttgtgcaagttttaagaaaaaaacaatagacaactatgaaaatcctattttgagcagcaatttagcgaatggtgaaagggtgcagattgtcctttcccctgttacagttaatgatgaaaccatttccatatccataaggatacctagcaaaacaacctatcctcatagcttctttgaagagcaaggtttttataatctactagacaacaaagaacaagcgatcagcgcgattaaagatggtattgctattggtaaaaatgtgattgtttgtggtggcacaggaagcggtaaaacgacttatatcaaaagcatcatggagtttatccctaaagaagaaaggatcatatccattgaagacaccgaagagattgtattcaaacaccacaaaaactacacacagcttttttttggtgggaatatcacctctgctgattgcttaaagtcatgtctgagaatgcggcctgatagaatcattttaggggaactcagaagcagtgaggcatacgatttttataatgtgctttgtagcggtcataaaggcacactaaccactctgcatgcagggagcagtgaagaagcgtttatccgtttggccaacatgagttcatctaatagcgcagcaaggaatatcaagtttgaaagtcttattgagggctttaaagatttgattgatatgattgtccatatcaaccaccacaaacagtgtgatgaattttatatcaaacacagg

SEQ ID NO: 48 - DNA, 5781 bp, Artificial Sequence
  Description of Artificial Sequence:  Synthetic Primer
atgaatgaagaaaacgataaacttgaaacttctaaaaaagcccaacaagattcaccccaagatttatccaatgaagaagcaacagaagccaatcattttgaaaatcttttaaaagaatccaaagaaagctcagatcatcatcttgacaaccccacagaaactcaaacccattttgatggagacaagtcagaagaaacccaaactcaaatggattctgaaggtaatgaaacttcagaatctagcaatggcagtctagcagacaagttattcaaaaaagccagaaaattagttgataataaaaaacctttcactcagcaaaagaatttagatgaagaaacccaagaactgaacgaagaagacgatcaagaaaataatgagtatcaagaagaaactcaaacggacttaattgatgatgaaacttctaaaaaaacccaacaacattcaccccaagatttatccaatgaagaagcaacagaagccaatcattttgaaaatcttttaaaagaatccaaagaaagctcagatcatcatcttgacaaccccacagaaactcaaaccaattttgatggagacaagtcagaagaaacccaaactcaaatggattctgaaggtaatgaaacttcagaatctagcaatggcagtctagcagacaagttattcaaaaaagccagaaaattagttgataataaaaaacctttcactcagcaaaagaatttagatgaagaaacccaagaactgaacgaagaagacgatcaagaaaataatgagtatcaagaagaaactcaaacggacttaattgatgatgaaacttctaaaaaaacccaacaacattcaccccaagatttatccaatgaagaagcaacagaagccaatcattttgaaaatcttttaaaagaatccaaagaaagctcagatcatcatcttgacaaccccacagaaactcaaaccaattttgatggagacaagtcagaagaaataactgacgactctaacgatcaagagattatcaaaggaagcaaaaagaaatatattattggtggcattgtagtcgctgttcttatcgtgattattttattttctagaagcatttttcactacttcatgcctttggaagataaaagctctcgttttagcaaagacaggaatctttatgtcaatgatgaaatccaaataaggcaagagtataaccgattgctgaaagaacggaatgaaaaaggcaatatgatcgataagaatcttttcttcaatgacgatcccaatagaaccttatacaactatttgaatattgcagaaattgaggacaaaaacccgttgagagccttttatgaatgtattagtaatggtggcaactatgaagaatgtttgaagcttatcaaagacaaaaaacttcaagatcagatgaaaaagactctagaggcttataacgactgcatcaaaaatgccaaaactgaagaagaaaggatcaagtgtttagatttaatcaaagatgaaaacctaaaaaaaagcttactgaaccaacaaaaagttcaagtggcgctagattgtttgaaaaacgctaaaaccgatgaagaacgaaacgagtgcctaaaactcataaatgaccctgagattagagagaaattccgtaaggaattagagcttcaaaaagagcttcaagagtataaggattgtatcaaaaacgccaaaacagaagctgagaaaaacaaatgcttgaaaggcttgtctaaagaagctatagagagattgaaacagcaagcgctagattgtttgaaaaacgctaaaaccgatgaagaacgaaacgagtgcttgaaaaatattccccaagacttgcaaaaagaactattagctgatatgagcgtcaaggcttacaaggattgcgtatcaaaagctagaaatgaaaaagagaaacaagaatgcgagaaattgctcacgcctgaagcgaggaaaaagttagaacaacaggttctagattgtttgaaaaacgctaaaaccgatgaagaacgaaaaaagtgtttgaaagatctccctaaagacttacaaagcgatattctagccaaagagagcctgaaagcttataaagactgcgtatctcaagccaaaaccgaagctgagaaaaaagaatgcgagaaattactcacccctgaagcgaaaaaacttttagaagaagaagccaaagagagcgttaaggcttatttggattgcgtatctcaagccaaaaccgaagctgagaaaaaagaatgcgagaaattgctcacccctgaagcgaaaaaaaagttagaagaagctaaaaaaagcgttaaagcttacttggattgcgtatcaagagctaggaatgaaaaagagaaaaaagaatgcgagaaattgctcacccctgaagcgaaaaaacttttagagcaacaagcactagattgtttgaaaaacgctaaaaccgataaagaacgaaaaaagtgtttgaaagatctccctaaagacttgcagaaaaaggttttagctaaagaaagcgttaaagcttacttggattgcgtatctcaagccaaaactgaagctgagaaaaaagaatgcgagaaattactcacccctgaagcgagaaaacttttagaagaagctaaaaaaagcgttaaggcttatttggattgcgtatctcaagccaaaactgaagctgagaaaaaagaatgcgagaaattactcacccctgaagcgagaaaacttttagaagaagamgccaaagagagcgttaaagcttacttggattgcgtatctcaagccaaaaacgaagctgagaaaaaagaatgcgagaaattgctcacccttgaatcgaaaaaaaagttagaagaagctaaaaaaagcgttaaggcttatttggattgcgtatctcaagccaaaaccgaagctgagaaaaaagaatgcgaaaaattgctcacgcctgaagcgaaaaaacttttagagcaacaagcgctagattgtttgaaaaacgctaaaaccgaagctgataaaaaaaggtgtgtcaaagatctccctaaagacttgcagaaaaaggttttagccaaagagagcctgaaagcttataaagactgcgtatcaaaagctaggaatgaaaaagagaaaaaagaatgcgagaaattactcacccctgaagcgaaaaaacttttagaagaagctaaaaaaagcgttaaggcttacttggattgcgtatctcaagccaaaactgaagctgagaaaaaagaatgcgagaaattactcacccctgaagcgagaaaactcttagaagaagctaaagagagcgttaaagcttataaagactgcgtatcaaaagctaggaatgaaaaagagaaaaaagaatgcgagaaattactcacgcctgaagcgaaaaaacttttagagcaacaagtgctagattgtttgaaaaacgctaaaaccgaagctgataaaaaaaggtgtgtcaaagatctccctaaagacttgcagaaaaaggttttagctaaagagagcgttaaggcttatttggactgcgtatcaagagctaggaatgaaaaagagaaaaaagaatgcgagaaattgctcacccctgaagcgaaaaaacttttagaagaagccaaagagagtcttaaagcttataaagactgcctctctcaagctagaaatgaagaagaaaggagagcttgcgagaaactactcacgcctgaagcgagaaaactcttagagcaagaagttaagaaaagcattaaggcttatttggactgcgtatcaagagctaggaatgaaaaagagaaaaaagaatgcgagaaattactcacgcctgaagcgagaaaatttttagcgaagcaagtgctaaattgtttggaaaaagctggaaatgaagaagaaagaaaagcatgtcttaaaaatctccctaaagacttacaggaaaatattttagctaaagagagtcttaaagcttataaagactgcctctctcaagctagaaatgaagaagaaaggagagcttgcgagaaactactcacgcctgaagcgagaaaactcttagagcaagaagttaagaaaagcgttaaggcttatttggactgcgtatcaagagctaggaatgaaaaagagaaaaaagaatgcgagaaattactcacgcctgaagcgagaaaatttttagcgaaagaactccaacaaaaagataaagcgatcaaagattgcttgaaaaacgccgatcctaacgacagagcggctatcatgaagtgtttggatggtttgagcgatgaagagaagctcaaatacctgcaagaagctagagaaaaggctgttgcggattgtttggctatggctaaaaccgatgaagaaaaaaggaaatgccaaaacctttatagcgatttgatccaagaaatccaaaataaaaggacacaaaacaaacaaaatcaattgagtaaaacagaaaggttgcatcaagcaagcgagtgcttggataacttagatgaccctactgatcaagaggccatagagcaatgtttagagggcttgagcgatagtgaaagggcgctaattctaggaattaaacgacaagctgatgaagtggatctgatttatagcgatctaagaaaccgtaaaacctttgataacatggcggctaaaggttatccattgttaccaatggatttcaaaaatggcggcgatattgccactattaacgccactaatgttgatgcggacaaaatagctagcgataatcctatttatgcttccatagagcctgatattgccaagcaatacgaaacagaaaaaaccattaaggataagaatttagaagctaaattagctaaggctttaggtggcaataaaaaagatgacgataaagaaaaaagtaaaaaatccacagcagaagctaaagcagaaaacaataagatagacaaagatgtcgcagaaactgccaagaatatcagtgaaatcgctcttaagaacaaaaaagaaaagagtggggaatttgtagatgaaaatggtaatcccattgatgacaaaaagaaagcagaaaaacaagatgaaacaagccctgtcaaacaggcctttataggcaagagtgatcccacatttgttttagcgcaatacacccccattgaaatcactctgacttctaaagtagatgccactctcacaggtatagtgagtggggttgtagccaaagatgtatggaacatgaacggcactatgatcttattagacaaaggcactaaggtgtatgggaattatcaaagcgtgaaaggtggcacacccattatgacacgcttaatgatagtctttactaaagccattacgcctgatggtgtgataatacctctagcaaacgctcaagcagcaggcatgttgggtgaagcaggggtagatggctatgtgaataatcactttatgaagcgcataggctttgctgtgatagcaagcgtggttaatagcttcttgcaaactgcgcctatcatagctctagataaactcataggccttggcaaaggtagaagtgaaaggacacctgaatttaattacgctttgggtcaagctatcaatggtagcatgcaaagttcagctcagatgtctaatcaaattctagggcaactgatgaatatccccccaagtttttacaaaaacgagggcgatagtattaagattctcacaatggacgatattgattttagcggtgtgtatgatgttaaaattactaacaaatctgtggtagatgaaattatcaaacaaagcaccaaaactttgtctagagaacatgaagaaatcaccacaagccccaaaggtggcaat

SEQ ID NO: 49 - DNA, 1143 bp, Artificial Sequence
  Description of Artificial Sequence:  Synthetic Primer
gtgaaatgttttttaagcatattttctttcttgactttttgtggtttgtctctgaatggcacagaagtagtaataacgcttgaacccgccttaaaagccattcaggcggacgcacaagccaaacaaaaaaccgctcaagctgaattaaaagccatagaagctcagtctagtgccaaagaaaaagccattcaagcgcaaatagagggagaattgaggactcagcttgcaaccatgagtgctatgttaaaaggggctaatggcgttattaatggtgtcaatggcatgacaggggggttttttgcaggttcagacatcttgcttggcgtcatggaagggtattcaagcgcgcttagtgcattgggggggaatgttaaaatgatcgtggaaaaacaaaaaattaacacccaaacagaaatccaaaacatgcaaatcgcgctccaaaaaaataacgaaataatcaagctcaaaatgaaccagcaaaacgctctcttagaagcgttaaaaaatagctttgaaccgagcgttactctaaaaacacaaatggaaatgctttctcaagctctaggaagttcttctgacaacgctcaatacatcgcttacaatacgattggtatcaaggcgtttgaagaaaccttaaaaggttttgaaacatggttgaaagtggctatgcaaaaagcgacccttattgattataattccctaacgggtcaggctttgtttcaaagtgccatctatgcgcctgctcttagttttttttcaagcatgggtgcaccatttggaatcattgaaacattcactctagcgcccacaaaatgcccctatcttgatgggctaaaaatttcagcatgccttatggaacaggttattcagaattacagaatgattgtagcccttattcaaaataaactgagtgatgcagattttcaaaatatcgcttatttgaatgggatcaatggagaaatcaaaaccttaaaaggatcagtagatttgaacgcgctcatagaagttgctatcttaaacgcagaaaatcatttaaactatatagagaatcttgaaaaaaaagccgacctttgggaagaacaactgaaattagaaagagaaacgacagcaagaaacattgctagctctaaagttattgtcaaa

SEQ ID NO: 50 - DNA, 1110 bp, Artificial Sequence
  Description of Artificial Sequence:  Synthetic Primer
  modified_base (735): n = a, c, g or t/u
atggcaggtacacaagctatatatgaatcatcttctgcaggattcttatcggaaatttcctcaatcatctcaagcacaagtggtgttgcagggccatttgcaggaatagtagcgggtgctatgtcagcagcgattattcctattgttgtgggatttactaatccgcaaatgaccgctatcatgacccaatacaatcagagcatcgctgaagccgtaagcatgcctatgaaagctgctaaccaacaatacaaccaattgtatcaaggttttaacgatcaaagcatggctgtggggaacaatatcttaaatatcagcaaattaacaggggaatttaacgtgcaaggcaacacgcaaggcgcgcaaattagtgccgttaatagtcagattgcaagcattttagcgagtaacaccacccctaaaaatcctagcgctattgaagcttatgcgacaaatcaaatcgctgttcctagtgtgccaacaacggttgaaatgatgagcggtatcttaggcaatattacaagcgcggcaccaaaatacgccctagctctacaagagcaattgcgttctcaagcaagcaacagctcaatgaatgatacagccgattcccttgatagctgtaccgctttaggtgcacttgttggctcatcaaaagtgttttttagttgcatgcaaatttctatgacgcccatgagtgtttctatgcccactgtttatgccaaataccaagcgttascnactaatgccctaacttcaggcactaatcctatgaccactcctgcatgccctattggggacaaagttcttgccgtttattgctatgctgaaaaagtagcagaaattttgagggaatactatatagaatttgtgaaaaacaataccaatttgttgcaaaacgcttctcaaatgatacttaatcaatcaggattagctactagcacctatgacactcaagcgatttctaacataagctcgctatataattacaatatagtagcgaataaatcttttttgaaatcgcatttgacttaccttgattacatcaaaaacaagcttaaggggcaaaaagatagctacttaacagaaagggtgcaaactaaaataatcgtgaag

SEQ ID NO: 51 - DNA, 426 bp, Artificial Sequence
  Description of Artificial Sequence:  Synthetic Primer
atgaaaacgaatttttataaaattaaattactatttgcttggtgtcttatcattggcatgtttaacgctccgcttaatgctgaccaaaacacggatataaaagatattagtcctgaagatatggcactaaatagcgtggggcttgtttctagagatcaactaaaaatagagatccctaaagaaaccctagaacaaaaagtggccgtactcaatgactataatgataagaatgttaatatcaagtttgacaacataagtttagggagttttcaacctaatgataatctaggtatcaatgcgatgtggggcattcaaaatcttctcatgagccaaatgatgggcgattacggtccaaacaatcctttcatgtatggttatgcaccaacatactcagattcatcatttttaccaccgatcttagggtat

SEQ ID NO: 52 - DNA, 2949 bp, Artificial Sequence
  Description of Artificial Sequence:  Synthetic Primer
gtgtttgtggcaagcaaacaagctgacgaacaaaaaaagctagtcatagagcaagaggttcaaaagcgccaatttaaaaaaatagaagaacttaaagcagacatgcaaaagggtgtcaatcccttttttaaagtcttgtttgatggggggaataggttgtttggtttccctgaaactttcatttattcctctatatttatattgtttgtaacaattgtactatctgttattctttttcaagcctatgaacctgttttgattgtagcgattgttattgtgcttgtagctcttggattcaagaaagattataggctttatcaaagaatggagcgagcgatgaaatttaaaaaaccttttttgtttaagggcgtgaaaaacaaagcgttcatgagcattttttccatgaagcctagtaaagaaatggctaatgacatccacttaaatccaaacagagaagacaggcttgtgagcgctgcaaactcctatctagcgaataactatgaatgttttttagatgatggggtgatccttactaacaactattctcttttaggcacaatcaaattggggggcattgattttttaaccacttccaaaaaagatctcatagagttacacgcttctatttatagcgtttttaggaattttgttacccctgaattcaaattctattttcacactgttaaaaagaaaatcgttattgatgaaaccaatagggactatagtcttattttttctaatgatttcatgcgagcctataatgagaagcaaaagagagaaagtttttatgatattagtttttatctcaccatagagcaagatttattagacactctcaatgaacccgttatgaataaaaagcattttgcagacaataattttgaagagtttcaaaggattattagagccaagcttgaaaacttcaaggataggatagagctcatagaagagctattgagtaaataccaccccattagattaaaagaatacactaaagatggcgttatttactccaaacaatgcgagttttataatttccttgtgggaatgaatgaagccccttttatttgcaacagaaaagacttgtatctcaaggaaaaaatgcatggtggggtgaaagaagtttattttgccaataagcatggaaaaatcttaaatgacgatttgagtgaaaaatattttagcgctattgagattagtgaatacgcccctaaatcacaaagcgatttgtttgataaaatcaacgccctagacagcgaatttattttcatgcatgcttattcgcctaaaaactcacaggttttaaaggacaaactagctttcacctctagaagaattattattagtggaggctctaaagagcagggcatgactttaggttgcttgagcgaattagtgggtaatggtgatattacgctaggcagttatggtaattctttagtgttgtttgctgatagctttgaaaaaatgaaacaaagcgttaaggaatgcgtctctagtcttaacgctaaaggttttttagccaacgcagcgactttctctatggaaaattactttttcgccaaacattgctcttttatcacgcttccttttatttttgatgtaacttctaataattttgctgatttcatcgctatgagggctatgagttttgatggcaatcaggagaataacgcttggggcaatagtgtgatgacgctaaaaagcgagatcaattcgcctttttatctgaacttccacatgcctactgattttggttcagcttcagcaggacacactttgatacttggctcaaccggttcaggtaagacagtgtttatgtcaatgaccttgaacgctatggggcaatttgttcacaattttcctgctaatgtcagcaaagacaagcaaaagctcactatggtttatatggataaagattatggcgcttatgggaatattgtcgcaatgggtggggagtatgtcaagattgagctagggacagatacaggattaaatccttttgcttgggcggcttgtgtgcaaaaaacaaatgcaacaatggagcaaaaacaaacagctatttctgttgtcaaagagcttgtgaaaaacttagcaaccaaaagcgatgaaaaagatgagaatggcaacagcatctcttttagcctagcagattctaatacgcttgcagcggcagtaaccaaccttatcacaggagatatgaacctagattatcccatcactcaacttattaatgctttcgggaaagaccacaatgatcctaatgggcttgtcgcgcgattagcacctttttgcaaatcaaccaatggtgaatttcaatggctttttgataataaagcaacggatcgcttagatttttcaaaaacgattattggcgttgatgggtcaagtttcttagacaataatgatgtttcgccctttatttgtttttaccttttcgctcgtatccaagaggcaatggatgggcgtagatttgtcttagatattgatgaagcttggaaatatttaggcgatccaaaggtcgcttattttgtaagagacatgctaaaaactgcaaggaaaagaaacgctattgtcagacttgcgactcaaagcatcactgatcttttggcttgccctattgctgatacgattagagaacaatgccctacaaagatttttttgagaaacgatgggggcaatctttctgattaccaaagattggctaatgttacagaaaaagaatttgaaatcatcactaagggactagataggaaaattctctacaaacaggatggaagccctagcgttatcgctagttttaatttgaggggcattcctaaagaatatttgaaaattttatccacagatactgtatttgtcaaagaaattgacaagattatccaaaaccatagtatcatagataaatatcaggccttgaggcaaatgtatcaacaaataaaggagtat

SEQ ID NO: 53 - DNA, 621 bp, Artificial Sequence
  Description of Artificial Sequence:  Synthetic Primer
ttgatcaataataatagtaataaaaaactgagaggcttttttgtgaaagttctcttaagtctcgttgttttcagttcgtatgggttagcaaatgacgataaagaagccaaaaaagaagtgctagaaaaagaaaaaaacactcccaatgggcttgtttatacgaatttagattttgatagtttcaaggcgactatcaaaaatttgaaagacaagaaagtaactttcaaagaagtcaatcccgatattatcaaagatgaagtttttgacttcgtgattgtcaatagagtccttaaaaaaataaaggatttgaagcattacgatccagttattgaaaaaatctttgatgaaaagggtaaagaaatgggattgaatgtggaattgcagatcaatcctgaagtgaaagacttttttacttttaaaagcatcagcacgaccaacaaacaacgctgctttctatcgttgcgcggggaaacaagagaaattttatgcgatgataagctgtataatgttttattggccgtattcaattcttatgaccctaatgatcttttgaaacatattagcaccgtagagtctctcaaaaaaatcttttatacgattacatgtgaagcggtatatcta

SEQ ID NO: 54 - DNA, 3558 bp, Artificial Sequence
  Description of Artificial Sequence:  Synthetic Primer
atgactaacgaaactattgatcaaacaagaacaccagatcaaacacaaagccaaacagcttttgatccgcaacaatttatcaataatcttcaagtggcttttattaaagttgataatgttgtcgcttcatttgatcctgatcaaaaaccaatcgttgataagaacgatagggataacaggcaagcttttgatggaatctcgcaattaagggaagaatactccaataaagcgatcaaaaatcctaccaaaaagaatcagtatttttcagactttatcgataagagcaatgatttaatcaacaaagacaatctcattgatgtagaatcttccacaaagagctttcagaaatttggggatcagcgttaccaaattttcacaagttgggtgtcccatcaaaaagatccgtctaaaatcaacacccgatcgatccgaaattttatggaaaatatcatacaaccccctatccctgatgataaagaaaaagcagagtttttgaaatctgccaaacaatcttttgcaggaatcattatagggaatcaaatccgaacggatcaaaagttcatgggcgtgtttgatgaatccttgaaagaaaggcaagaagcagaaaaaaatggagggcctactggtggggattggttggatatttttctctcatttatatttaacaaaaaacaatcttccgatgtcaaagaagcaatcaatcaagaaccagttccccatgtccaaccagatatagccactactaccaccgacatacaaggcttaccgcctgaagctagggatttacttgatgaaaggggtaatttttctaaattcactcttggcgatatggaaatgttagatgttgagggagtcgctgacattgatcctaattacaagttcaatcaattattgattcacaataacgctctgtcttctgtgttaatggggagtcataatggcatagaacctgaaaaagtttcattattgtatgcgggcaatggtggttttggagacaaacacgattggaacgccaccgttggttataaagaccaacaaggtaacaatgtggctacactcattaatgtgcatatgaaaaacggcagtggcttagtcatagcaggtggtgagaaagggattaataaccctagtttttatctctacaaagaagaccaactcacaggctcacaacgagcattgagtcaagaagagatccgaaacaaagtagatttcatggaatttcttgcacaaaataatactaaattagacaacttgagcgagaaagagaaagaaaaattccaaaatgagattgaagattttcaaaaagactctaaggcttatttagacgccctagggaatgatcgtattgcttttgtttctaaaaaagacacaaaacattcagctttaattactgagtttaataatggggatttgagctacactctcaaagattatgggaaaaaagcagataaagctttagatagggagaaaaatgttactcttcaaggtagcctaaaacatgatggcgtgatgtttgttgattattctaatttcaaatacaccaacgcctccaagaatcccaataagggtgtaggcgctacgaatggcgtttcccatttagaagcaggctttaacaaggtagctgtctttaatttgcctgatttaaataatctcgctatcactagtttcgtaaggcggaatttagagaataaactaaccgctaaaggattgtccctacaagaagctaataagctcatcaaagactttttgagcagcaacaaagaattggctggaaaagctttaaacttcaataaagctgtagctgaagctaaaagcacaggcaactatgacgaggtgaaaaaagctcagaaagatcttgaaaaatccctaaggaaacgagagcatttggagaaagaagtagagaaaaaattggagagcaaaagcggcaacaaaaataaaatggaagcaaaagctcaagctaacagccaaaaagatgagatttttgcgttgatcaataaagaggctaatagggatgcaagagcaatcgcttacactcaaaatcttaaaggcatcaaaagggaattgtctgataaacttgaaaaaatcagcaaggatttgaaagactttagtaaatcttttgatgaattcaaaaatggcaaaaataaggatttcagcaaggcagaagaaacgctaaaagcccttaaaggctcggtgaaagatttaggtatcaatccagaatggatttcaaaagttgaaaaccttaatgcagctttgaatgaattcaaaaatggcaaaaataaggatttcagcaaggtaacgcaagcaaaaagcgaccttgaaaattccgttaaagatgtgatcatcaatcaaaaggtaacggataaagttgacaatctcaatcaagcggtatcagtggctaaagcaatgggcgatttcagtagggtagagcaagtgttagccgatctcaaaaacttctcaaaggagcaattggctcaacaagctcaaaaaaatgaagatttcaatactggaaaaaattctgaactataccaatccgttaagaatagtgtaaataaaaccctagtcggtaatgggttatctggaatagaggccacagctctcgccaaaaatttttcggatatcaagaaagaattgaatgagaaatttaaaaatttcaataacaataataatggactcaaaaacagcacagaacccatttatgctaaagttaataaaaagaaaacaggacaagtagctagccctgaagaacccatttatactcaagttgctaaaaaggtaaatgcaaaaattgaccgactcaatcaaatagcaagtggtttgggtggtgtagggcaagcagcgggcttccctttgaaaaggcatgataaagttgatgatctcagtaaggtagggctttcagctagccctgaacccatttacgctacgattgatgatctcggcggacctttccctttgaaaaggcatgataaagttgatgatctcagtaaggtagggcgatcaaggaatcaagaattggctcagaaaattgacaatctcaatcaagcggtatcagaagctaaagcaggtttttttggcaacctagagcaaacgatagacaagctcaaagattctacaaaaaagaatgttatgaatctatatgttgaaagtgcaaaaaaagtgcctgctagtttgtcagcgaaattggacaattatgctattaacagccacacacgcattaatagcaatatccaaaatggagcaatcaatgaaaaagcgaccggtatgctaacgcaaaaaaaccctgagtggcttaagctcgtgaatgataagatagttgcgcataatgtgggaagcgtttctttgtcagagtatgataaaattggcttcaaccagaagaatatgaaagattattctgattcgttcaagttttccaccaagttgaacaatgctgtaaaagacattaagtctggctttacgcactttttagccaatgcattttctacaggatattactgcttggcgagggaaaatgcggagcatggaatcaaaaatgttaatacaaaaggtggtttccaaaaatct

SEQ ID NO: 55 - DNA, 1248 bp, Artificial Sequence
  Description of Artificial Sequence:  Synthetic Primer
gtggcaataaacacctttttaaaacattcttttttagtctgtttgttagcggttaattcttacgcttttgattggaacatttttaaatacaatctgggtttcaatatgttcatcatggaccatgaaggctcaacgccttattgggtcaatactaacaccaatcttaaaacccgtttgactccaaattttgggatccaattttatacaagaggtgtggagcaaagcttgactgtgggggcgtatttttttcaaaacttccataactacagcactaattttccctaccgttgggggcctactatgtattataaggctagagggaagcgttttactttttatggagggattttccctaggaaaaacctcttaggaaggtatggtttgaatatttttgccccttattattggtttatagatccaaacgctagagggtttttattgcaatttcaaaaccattattcgccttcaaaaccctattatgggcatgcggagttcatgctagattggtttggaggcaattgttacaacacttgtaagtttgggagaaacccttatgggaacgcaatggacaggtttcaaatgaacggctctgtcgcttataatttctttaaggatttattgggtattggagggtattttgtcttgttccataacgaagacaaataccttttaaatggggctgatggcatgcagtttaatgaaaaaaaagcgattgataacagtgcgatttatttactggatcgcctttattataatgcttacattagcacaagccttttagacatcgccccctttatggaaaaactcagcgctaaatttggcatggtttctgaagcgagccgattgagaaacagagagaaagaagtgccctttatcaatagcgtgggcgggcaatttgatgtggagatccaatacaaaggctttggcatccacaatttatttttcttcgccaagaccccagagatgcctttttataaccaataccagtatgttgaaatgtattgcacgccttcgtattgccccacgcctatttatcgtggcgtgccattctttcaagcgaacatgtataaccgttttgatttctattacaactggaaaaacgacttcgcatcggtccgcatcaatttcgtgcttaatgcgatgcgtgggggctttgataggagcttgccttggtcagaatcttaccaagtgtatatgacggttgcttttgatccttataaccttattaacaaaattgccagaaaaaag

SEQ ID NO: 56 - DNA, 1020 bp, Artificial Sequence
  Description of Artificial Sequence:  Synthetic Primer
atgatgattttcattgatgcatgttttagaaaggaaacgccttacacgcccatttggatgatgaggcaagcggggcgttaccttagcgaataccaagagagccgtaaaaaagcggggagtttcttggaattgtgtaaaaatagcgatctagccacagaagttaccttacagccggtagagattttaggcgtggatgcggctattttgtttagcgatattttagtagtgcctttggaaatgggcttgaatttggagtttatccccaaaaaggggccgcattttttagagacgattacggatttaaaaagcgtggaaagcctaaaagtaggggcttataaacaactaaactatgtctatgatacgatttctcaaacgcgccaaaagctttctagagagaaagcgttaatcggtttttgcggatcgccttggactttagcgacttacatgatagaaggcgaggggagcaaatcgtatgccaaaagcaagaaaatgctttatagcgagcctgaagttttaaaagcgcttttagaaaaattaagccttgaattgatagagtatttgagccttcaaatccaagcaggggtcaatgcagtgatgatctttgactcatgggctagcgctttagaaaaagaagcgtatttgaaattcagttgggattatttgaaaaaaatctctaaagagcttaaaaaacgctatgcgcatatcccagttatccttttccctaaagggattggcgcttatttggatagcatagatggggaatttgatgtgtttggcgtggattggggcacgcctttaactgcggcaaaaaagattttaggcggtaagtatgttttgcaagggaatttagaacccacccgcctttatgataaaaacgctttagaagaaggggttgaaacgattctaaaagtcatgggcaatcaagggcatatttttaatttagggcatgggatgttgccggatttacccagagaaaacgccaaatatttagtgcaattagtgcatgctaaaaccagacga

SEQ ID NO: 57 - DNA, 3084 bp, Artificial Sequence
  Description of Artificial Sequence:  Synthetic Primer
atgtataaaacagcgattaatcgtcctattacgaccttaatgtttgctttggcgattgtcttttttgggactatggggtttaaaaaattgagcgtggcgcttttccctaaaattgatttgcctacggtggtggttactacgacttatcctggggctagcgctgaaatcatagagagtaaggtaaccgataagattgaagaagcggtgatggggattgatgggatcaaaaaggttacttccacgagttctaaaaatgtgagtatcgtcgtcattgaatttgagttagaaaaacctaatgaagaagccttaaacgatgtggtgaataaaatttcttcggtgcgttttgatgactctaacattaaaaaaccctctatcaataaatttgataccgacagccaagccattatttcattgtttgtgagcagttcaagcgtgccggctacaacccttaatgactacgctaaaaacaccatcaaacccatgctccaaaaaatcaatggggtagggggcgtgcagctcaacggctttagggagcgccagattaggatttatgcaaatcccactttgatgaataaatacaacctgacttatgcggatcttttcagcacgcttaaagcggagaatgtggaaattgatggggggcgcattgtcaatagccaaagggaattttctattttaatcaatgcgaatagttatagcgttgcggatgtggaaaagattcaagtgggtaatcatgtgcgtcttggcgatattgcaaaaattgaaatcggtttggaagaagacaacacttttgcgagctttaaagacaaacccggtgtgattttagaaatccaaaagattgccggagcgaatgaaattgaaatcgtagatagggtgtatgaagctttaaagcgcattcaagccattagccctaactatgaaatcagaccctttttagacaccacgggctatatccgcacctctattgaagacgtgaaatttgatctagttttaggggcgattttagcggttttagtggtgtttgcgttcttgcgtaacggcacgatcaccctcgtttcagcgatctctatccctatttctatcatggggacttttgcgctcatccaatggatgggcttttcattaaacatgctcaccatggtggctttaacgttggcgatagggattatcattgatgatgcgatcgtggtgattgaaaacatccataaaaagctagaaatgggcatgagtaaacgaaaagcgagctatgagggggtgagagaaattggctttgctctagtggcgatttcagcgatgctgctctctgtttttgtgcctatagggaacatgaaaggcattattgggcgtttttttcaaagttttgggatcacggtggctttagcgatcgctctatcgtatgtggtggtcgttacgattatccccatggtaagctcagtcgtggtcaatcccaggcattctcgtttttatgtgtggagtgagcctttttttaaggctttagagtctcgttataccaagttgctccaatgggtattaaaccacaagatcattatctctatagcggtggttttggtgtttgtgggatcgctttttgtggcttctaagattggtatggagttcatgctgaaagaagatagggggaggtttttggtgtggcttaaggctaaaccgggcgtgagcatagattacatgacacaaaagagtaagatctttcaaaaagcgattgaaaaacatgctgaagtggaattcaccaccttgcaagtgggttatggcaccacacaaaacccttttaaggctaagatttttgtgcaactcaagcctttaaaagagcgtaaaaaagagcatcaattggggcaatttgagttgatgagcgttttaaggaaagagttgagaagcttgcctgaagctaaaggtttagatactattaatctttctgaagttactcttatagggggcggtggggatagttcgcccttccaaacctttgtgttttcccattctcaagaagcggtggataaaagcgtggagaatttgaaaaaattcttattagaaagccctgaattaaaaggcaaggttgaaagctatcatacaagcacgagcgaatcgcaaccgcaattgcaactcaaaatcttaagacaaaacgctaacaaatacggcgtgagcgctcaaaccattggatcagtggtgagctctgctttttctgggacttctcaagcgagcgtgttcaaagaagatggcaaagaatacgacatgatcattagagtgcctgatgacaagcgcgtttctgtagaagacatcaaacgcttgcaagtgcgtaacaaatacgataaattgatgtttttagacgctttagtggaaatcacagaaactaaaagcccgtccagtatttctcgctataaccgccaacgcagcgttacggtgcttgctgagcctaataggaatgcgggcgtttctttaggcgagattttaacgcaagtgagcaaaaacactaaagaatggttggttgaaggggcgaattacagatttaccggagaagcggataacgccaaagagagcaacggggagtttttagtcgctttagcgacagcgtttgtgctgatttatatgattttagcggcgttgtatgagtccattttagagccttttatcatcatggttaccatgcctttaagtttttcaggggcgttttttgctctaggtttagtccatcagcctttgagcatgttctctatgataggcttgattttgctcattggtatggtgggtaaaaacgccacgcttttaattgatgtggcgaatgaagagcgtaaaaaaggtttgaatatccaagaggccattttatttgccggcaaaacccgtctaagaccgattttaatgacgaccattgcgatggtttgcgggatgctgcctttagcgttggcgagtggggatggagcggcgatgaaatcccctatagggattgcgatgagtgggggcttgatgatttctatggtgttaagcttactcattgtgccggtgttttatcgtttgctcgctcccatagacgacaaaatcaagcggttttatcaaaaccaaaaaactttagaa

SEQ ID NO: 58 - DNA, 582 bp, Artificial Sequence
  Description of Artificial Sequence:  Synthetic Primer
atgaaaaaagtactcatcattaacggggccaaagcgttcgggagctctggagggaaactcaatgaaaccttgactgaccatgcaaaaaagactctagagtctttggggctagaagtggatactacgatcgtggataaaggctatgaacatgctcaagaagtggagaaagtctttagcgctgatgcgacgatttggcaaatgcctggctggtggatgggagagccttggattgtgaaaaaatacattgatgaagtctttagcgtagggcatggaaagctttatgctagcgatggcagaagctcgcaaaaccccactaaaaactacgggaaagggggcttgatgcaaggcaaaaaatacatgttgagcttgacttggaacgctcccattgaagcctttaatgatcctagtgaattttttgaaggggtgggtgtggatgttgtgtatttgcatttgcataaagcgttccaatttttagggctttcagcgttgcccacttttatttgcaacgatgtggtgaaaaacccccaagtggagcagtatcttaactctctcaccacgcatttgcgccaagcttttggcaag

SEQ ID NO: 59 - DNA, 1536 bp, Artificial Sequence
  Description of Artificial Sequence:  Synthetic Primer
ttggtttttgtttttctttttaaatgcgttaatgaagaaacaagcctgaattttacgccccttttagagcgaatggcatgcaatttgcaagcgcgtttttatagcgtttataaggataataccacttctttctacctccaagcgagcgctgaaaccactttagagttcgcgcaaaaactcagcgaaattctgcccttttctttagattttagctttttgtctttaaaggaaatcacagagcctttagatgaaaatcttttccaaacagcaagcctttcaaagcccctttttatgaacgctaaagagcatcaagattttttagacaaaaattcatctttgtatgccgatactctgggcttgattaaaaacaccgcttttaagggggatataatccatagccctaaagagcttatagattgcttaacccaattaaaaggcatgctcaaaacgcaagattttatccctattttcacttctagagaggcgttatccctttctttaaaaaatccctctccaagcgttatttttagcgatctttctagcgttttgagctgcactaaattgcctttagaggacgctaaatatttggccagtttggaaaaaccctccatcaaagccccattaaaaagcgtgtttaaagacactttcaaaaacgatgaaatcatcgcccagctaccctatgaccccatattgaatttattgtgccatattttacaagatgaggggatagaatttgtttttatgcatgaaagccgttcttgtgaagcgcttttgtattatgaagcgctttttaaaacccctaaacgcttgatcacacccactaaaaaattcgtgctagaaaataatttttctacctttccctttaaagatgaattagagtttttaagcgcaacccccaattctatcgttttgtatctcagtttcaagcgccctacaaggttgttattgcatgctaatggttctttaaaaacgcttttaagcgtcagttttgattttaacaaaatgtttaacgcgctcaaacaagatgaaaaagcctccagaatgctacaaaactacgccactaaattccctgatttttacgcgcgcattgtagagctttctaaatacgatctagggggcgcgaatttattggattttttttgcattttagggtttgttttgggctatagcgaggatttttgcacacagagcgttattcctttggctaaagaatgcttacgccctaaaggccctaggattgattataaaatccttaaagacaattctttgaaaatggctttaaacttttcaaagatcatgcacagtgcgatgagtttcaggctcgcaggcgtggaaaatgaaattttgagtttggggattttggattctttagcggagtttttagggaatttcatttgggataacgcgcaaaattttagcgttcaagaagtaacgatcgctggggatttctttggcgaaaaagtgtttttggatttgtttgtgcggtatttccctaaaaccctagcccttaaaacgcatgcatttttggattatgaa

SEQ ID NO: 60 - DNA, 2748 bp, Artificial Sequence
  Description of Artificial Sequence:  Synthetic Primer
attaaaaaattaattctatcctctcttgttttcgcatgtatcaataccagcgttgaagctttagaaaatgacggctctaaaccaaacgatttgacttctccaaaagaagcctctcaagaatctcaaaaaaatgaagctccaaaaaatgaagttcaaagaaatgaagctcaaaaagaaaccccccaatccaatcaaacgcctaaagaaatgaaagtcaagtccatttcttatgtcgggctttcttacatgtctgacatgctcgctaatgaaattgtaaagattcgtgtgggcgatattgtggattctaaaaaaatagacaccgctgttttggctttgttcaatcaagggtattttaaagacgtttatgccacttttgaaggcggcatattagagtttcattttgatgaaaaagccaggattgccggggtagaaatcaagggttatgggactgaaaaggaaaaagacggcttaaaatcccaaatggggatcaaaaagggcgacacctttgatgagcaaaaattagagcatgctaaaacggctttaaaaaccgctttagaggggcagggctattatgggagcgtggtggaggtgcgcacagaaaaggtcagtgagggtgcattattgatcgtgtttgatgtgaataggggggatagcatttatatcaaacaatccatttatgagggaagcgcgaaattaaaacgccgcatgattgaatctttgagtgcgaacaagcaacgagatttcatgggctggatgtggggcttgaatgacgggaaattgcgtttagatcaactagaatacgattctatgcgtatccaagatgtgtatatgcgtaggggttacttagacgctcatatttcttcgccttttttgaaaacggatttttctacccatgacgctaagcttcattataaagtcaaagaggggatccaatacaggatttcagacattttaatagagattgacaacccggtagtccccttaaaaaccttagaaaaagcgcttaaagtgaaaaggaaagatgtctttaatattgagcatttaagagcggatgcgcaaattttaaaaaccgaaatcgccgataagggttatgcgtttgcggtggtgaagccagacttggataaagatgaaaaaaacgggcttgtgaaagtcatttatcgtattgaagtgggcgatatggtgtatatcaatgatgtcatcatttcagggaaccagcgcacgagcgataggatcattagaagggagttattgttagggcctaaggataaatacaacttgaccaaactgagaaattccgaaaattctttaaggcgtttaggattcttctctaaagtcaaaattgaagaaaaaagggttaatagctcactcatggatttattagtgagcgtagaagaggggcgtactgggcagttgcaatttgggttaggctatggctcttatggagggcttatgcttaatgggagcgtgagcgaaagaaacctttttggcacagggcaaagcatgagcttgtatgctaacatcgctacaggggggggtagatcttatccgggcatgccaaaaggagcggggcgtatgtttgccgggaatttgagcttgactaatccaaggatttttgacagctggtatagctctacgatcaacctttatgcggattacaggataagctaccaatacatccaacaaggcgggggctttggggtgaatgtcgggcgcatgctgggtaatagaacccatgtgagcttagggtataacttgaatgttaccaaactccttggtttcagcagccctttatacaaccgctactattcctctgttaatgaagtggtttctccaaggcaatgttctacccccgcatcggtgattatcaatcgcttatcaggcggtaaaacccccttacaacctgaaagctgttctagtcctggagcgatcaccacttcaccagaaataagaggtatttgggatagggattaccatacgcctatcaccagctctttcacccttgatgtgagctatgacaacaccgatgattattacttccctagaaatggggttatctttagttcctatgcgacgatgtctggcttgccaagctctggcacgctcaattcttggaacgggttaggcgggaatgtccgtaacaccaaagtttatggtaaattcgccgcttaccaccatttgcaaaaatatttattgatagatttgatcgctcgctttaaaacgcaaggaggttatatctttaggtataacaccgatgattacttgcccttaaactccaccttctacatggggggcgtaaccacggtgagaggctttaggaacggatcggttactcctaaagatgagtttggcttgtggcttggaggcgatgggatttttaccgcttctactgaattgagctatggggtgctaaaggcggctaaaatgcgcttagcgtggttttttgactttggtttcttaacctttaaaaccccaactagagggagttttttctataacgctcctgttacgacagcgaattttaaagattatggcgttataggggctgggtttgaaagagcgacttggagggcttccacaggcttgcagattgaatggatttcgcccatggggcctttggtgttgattttccctatagcgtttttcaaccaatggggcgatggcaatggcaagaaatgtaaagggctatgcttcaaccctaacatggacgattacacgcaacactttgaattttctatgggaacaaggttt

SEQ ID NO: 61 - DNA, 1242 bp, Artificial Sequence
  Description of Artificial Sequence:  Synthetic Primer
atgaggaaaattttttcttatgttttgaaggctttgttgtttattgggattgtttatgcagagccggaatctaaagtggaagccttagaagggaggaagcaagagtcttctttggataaaaaaatccgccaagaattgaagaataaggatttgaaaaataaagaattgaaaaataaaaaagaagaaaagaaaaacaccgaagaaaagaaagaaacaaaagccaagagaaagcccagggcagaagtccatcatggggataccaaaaatcccactcaaaaaataacgcctcctaaaatcaaagagaacgctaaaggagttcaaaatcaaggcgttcaaagcaacgcgccaaaacttgaagaaaaagacacaacctctcaaactcttgaaaaaaagggagcaagccctagctctcaattcaattccatttttggtaatcctaatgacgctgctaacaatacccttgaagataaggtcgtagggggcatttctttgcttgttaatggttcgcctatcacgctgtatcaaatccaagaagagcaagaaaaatctaaagtgagcaaagctcaagcaagggatcgtttgatcgctgaacgcattaaaaaccaagaaattgagcgcttaaaaatccatgtagatgacgacaagctagaccaagaaatggcgatgatggcgcaacaacaaggcatggatttggatcatttcaaacaaatgcttatggctgagggacattataaactctatagggatcagcttaaggagcatttggaaatgcaagaattgttgcgtaatatcttactcacgaatgtggataccagctctgaaactaaaatgcgcgaatattacaacaaacacaaggagcaattcagtatccccactgaaatagaaaccgtgcgctacacttccaccaatcaagaggatttagaaagggcgatggcggatcctaatttggaaattccaggggtgagtaaggctaatgaaaaaatagagatgaaaaccttaaaccctcaaatcgctcaagtctttatttcgcatgagcaaggctcttttacgcccgttatgaatgggggtggggggcagttcatcaccttttatatcaaggaaaaaaagggtaaaaacgaagtgagcttcagtcaggccaagcaattcatcgcccaaaaattagtggaagaatctaaagataagattttagaagagcattttgaaaaattgcgcgttaagtctaggattgtgatgattagagag

SEQ ID NO: 62 - DNA, 1299 bp, Artificial Sequence
  Description of Artificial Sequence:  Synthetic Primer
atgctttctgtcatcatactggccgctggtaaaggcactcgcatgcgttctagcctgcctaaaactttacacaccatttgtggggagcctatgttgttttacattttagaaacggctttttcaatcagcgatgatgtgcatcttatcttacaccaccaacaagaacgcattaaagaagcggtgttggagcgttttaagggcgtcatttttcacactcaaattgtggaaaaatattcagggacaggtggggctatcatgcaaaaagataaaacgcctatttctacgaaacatgagcgggttttgattttgaatgcggacatgcctttaatcactaaagacgctctcgcccccttattagaaagcaagaataacgctataggcttactccatttagctgaccctaaaggttatgggcgcgttgttttagaaaaccatcaggttaaaaagattgtagaagaaaaggacgctaatgatgaagaaaaagaaattaaaagcgtgaatgctggcgtgtatgggtttgaaagggattttttagaaaaatacttacccaagctccatgaccaaaacgcccaaaaagaatactacctcacggatttaatcgctctagggatcaatgaaaacgaaacaattgacgctattttcttaaaagaagagtgttttttaggggtgaatagccaaacagaaagggcgaaagctgaagaaatcatgctagaaagactgcgcaaaaacgccatggacttgggggtagtgatgcaattgcctaatagcatttatttagaaaaaggcgtgagttttaagggggagtgcgttttagagcaaggggtgcgtttgattgggaattgtttgatagaaaacgcgcatattaaggcttatagcgtgatagaagagagccagattgttaatagcagtgtggggccgtttgcccatgcgcgccctaaaagcgtgatttgtaatagccatgtggggaattttgtagagactaaaaacgctaaacttcaaggcactaaagcagggcatttgagctatttaggggattgtgagatagggaaaaacacaaatgtaggggctggcgtgatcacttgcaattacgatggtaaaaagaaacaccaaacaatcatcggtgaaaatgtctttatagggagcgatagccagctagtcgcccccataaatatcggctctaatgtcttaatcggcagcggcaccactatcactaaagacattcctagcggttcgttgagcctttcacgcgcccctcaaaccaacattgaaaacgggtattttaagttttttaagaaacct

SEQ ID NO: 63 - DNA, 1926 bp, Artificial Sequence
  Description of Artificial Sequence:  Synthetic Primer
atgaaagaaatcactatcgcccttgtgggccagcctaatgtggggaaatcgtccttaatcaacgctttgagcaacgcccatttgaaagtggggaattttgccggggttaccgtggataaaatggaagtgggtttgatccacaaagagcatcaaatcactatcattgatttacctggcacttacgcgctcaatgacttcaccactgaagaaaaggttactaaagattttttagaaaaagggcaatacgatctcattcttaatgtggtggattccaccaatttagagcgtaatttagccttaagcgcgcagctattagacacgaataaaaaaatgctactcgcactcaacatgtgggatgaggcacaaaaagagggcattaaaatcaatacagaaaagctttctaaagaattaggggttgtgtgcgtgccaacaagtgcaagatccaaagaagatcgcttgaataccgagcttttattagacgaaattgtcaggctttattctcaaaatactacaaataatgaaaacataaaagtcccgtctcaaagctttaaggagtctttaaaatacagccagagcgctcaaagaatcgctcaattagtgatcagtgaaaaccaacaaaacgcgagttttgaacacacttataagattgataagattttaatgcacaagcgttatgggattttcatttttttagggtttatgtttatcattttttccttgagctttttaataggggggggagtgcaaaaagcgcttgaaacagggtttaaatttttaagcgatggcatcaaagaaaatgtggctaatgaagatttagcgtctttggtgggcgatggcattattgggggagtgggagcgacggtttcattcttgcctttaattgtggtgttgtattttgggatttctttactagagacgacaggctatatgagtagggtagcgtttttgttagatgggatcttgcataaatttggcttacatgggaagagttttatccctttaatcaccggttttggctgctcagtgcccgcttacatggcgacaagaaccttacaaaactataacgaacgactgatcacgctttttgtgatcgggtttatgagctgctcggcaaggctgcctatttatgtgctgtttgtaggctcgtttttcccttcttcaagtgctgggtttgtgctgttttgcatttatattttgggggcggttgtggcgttagtgatggccaaattactcaaattaagcgtgtttaaaggacaaaccgaatcttttatcatggaaatgcccaaataccgctttcccagttggagaatggtctatttcagtatctacaccaaatcgctttcttaccttaaaaaggctgggacttacattttagtgggagcgattttaatctggtttatgtctcaataccctaaaagcgatgcggccatgaaagcttataaacaagaaagcttgttagtgaataaggataccactctttcaagcgaagctaaagaagaaaaattaaaagaattaaaaacagaattggataaaaagaatttaaaaaatagcattgtaggaagaggcggggcgtatttagaaaaagtctttagccctatggattttgattggcgtttgagtgtgtcgcttgtaaccggatttatggctaaagaggtggtggtttctactttgggcgtgttgttttctttaggggatcaaaatgaaaaatctgacgcttttagagggattttaagaaaagaagtcagcgtgcctagcggaatcgcttttatcgtgtttgtgatgttttatatcccttgttttgcagcgaccattacttttggtagggaagcgggagggataaagtttgtagcgtatttattcatcttcacaaccgttgtagcgtatgcgttttccttgatagctttttatgcgactcaaattttggtt

SEQ ID NO: 64 - DNA, 2295 bp, Artificial Sequence
  Description of Artificial Sequence:  Synthetic Primer
atggcaaatttattgaaaaacggcaaaactttaaaacaagctagagatgaaatcctagccaggacagaaaaaacagggcattataatggtctcaaaaaactagagtttaaagaaagagatccgattggttatgagaagatgttctctaaattaagaggcggtatcgtgcatgccagagaaacggctaaaaggattgcggcaagccctattgttgagcaagagggagaattgtgcttcacgctttataacgctgtgggcgatagcgtgctgacttctacaggtatcattatccatgtagggactatgggatcagctatcaaatacatggtagagaataattgggaagataacccaggcatcaatgacaaggatattttcaccaataacgactgcgcgattgggaatgtgcacccatgcgatattatgactcttgtgcctattttccacgatgaaaaattgattgggtgggtaggcggcgttacgcatgtgattgataccggttcggttactccaggatcgatgagcactggacaggttcaaagatttggggatggatacatgatcacttgccgtaagacaggagcgaatgatgaaagctttaaagattggttgcatgaatctcaaagatcggttcgcacgcctaaatattggattctagatgaaaggactaggattgcaggatgccatatgattagggatttagtgatggaagtcattaaagaagacggcattgattcttacatgcgatttattgatgaggtgattgaagaggggagaagaggccttatctctaggattaaatccatgaccataccaggcaagtatagaaaggtagcgtttgtggatgtgccttatgcgcataaggatattggcgtgtgctctgagtttgctaagctagacacgatcatgcactctcctgtggaaatcactatcaataaagacgctacatggaaattggattttgatggcgcgtctaggtggggatggcactctttcaattgcaaccaagtgtcttttactagcggtatttgggtgatgatgactcaaacgctgatacccacttctcgcatcaacgatggcgcttattttgcgactcaattcagactcaaaaaagggacttggatgaatccagatgacaggcgcaccgggcatgcttatgcgtggcacttcttggtatcaggctggagcgctttgtggagaggcttgtctcaagcgtattacagccgagggtatttagaagaggtcaattccgggaacgctaacacttccaattggctgcaaggtggcggtatcaaccaagatggagaaatccatgcggtgaatagctttgagacgagttcttgtgggactggagcttgtgcgataaaagacggcttaaatcacgcagcggctatttggaacccagagggcgatatgggcgatgttgaaatttgggaaatggcagagcctcttctttatttaggcaggaatgtcaaagccaataccggtgggtatgggaaatatcgaggcggtaacgggtttgaaaccttaagaatggtgtggggtgcgcatgattggaccatgttctttatgggtaatggctatatgaatagcgattggggtatgatgggaggctatccagcggctagtggttataggtttgaagcgcacaacaccgatttgaaaaacaggattaaaaataacgccagcttgcctttggggggcgattttaacccaactgatcgcgattatgaaaagcacatttctcatgcgtctcaagtcaaaagggataagcaatgcatcaccactgaaaactgctttgacaattacgacttgtatttgaattacatcaaaggcggtcctggatttggcgatccgattgaaagggatttgaatgcgattttagaagatctcaacagcaaacagctattgccagaatacgcttacaaggtttatggcgcagtggtgagtcaaaataaagacggcgtgtgggtcggcgatgaagccaaaacgaaagccagaagaaaagaaattcttgaaaacagaaaggctagatccataccggtaaaacaatggatggagcaagaaagaaacgctatccttgaaaaagaggcttccaaacaggttaagcacatgtatgcgactagctttgatctctcgcctaagtttttgaatgattttaaaacattctggaacttgccaaagaattggagcgtgaaagaagatgagcttggcgtattcacctatggatctaaatacaggatggatttgagcaaattgcctgatgtgcgcacagttctgttggttgatgagaaa

SEQ ID NO: 65 - DNA, 2481 bp, Artificial Sequence
  Description of Artificial Sequence:  Synthetic Primer
atgcaagataattcagtcaatgaaacaaaaaatattgtagaagtggggattgattcttctattgaagagagctatttagcttattccatgagcgtgatcatagggcgcgctttaccggacgctagagatggcttaaagcccgtgcataggcgtattttgtatgcgatgcatgaattaggccttacttcaaaagtcgcttacaaaaaaagcgctaggatcgtgggtgatgtgattggtaaataccacccccatggcgataatgcggtttatgatgcgctagtgagaatggcgcaagatttttccatgcgtttggaattagtggatgggcagggcaactttggctctattgatggcgataacgccgcagcgatgcgttacactgaagccagaatgactaaggcgagtgaagaaattttaagggatattgataaagacaccattgattttgtgcctaattatgacgataccttaaaagagccagatattttaccaagccgtctgcctaaccttttagtcaatggggctaatgggatcgctgtggggatggcgacttctatcccccctcacaggatggatgaaatcatagacgctttagtgcatgtcttagaaaaccctaacgctggattagatgaaatcttagaatttgtcaaagggcctgattttcccactggtgggatcatttatggcaaggcgggtattattgaagcctataaaacggggcgaggacgcgtgaaagtgcgggccaaagtgcatgtggaaaaaacaaaaaataaagaaatcatcgttttagatgaaatgccttttcaaaccaataaagccaaattagtggaacaaatcagcgatttagcgcgagaaaagcaaattgaaggcattagtgaagtgcgcgatgagagcgatagagagggcattagagtggtgattgaattaaaaagagacgcgatgagtgaaattgtcttaaaccacctctacaaactcaccactatggaaaccacttttagcatcattttactcgctatttacaataaagagcctaagattttcacgcttttagagttgttgcaccttttcttaaaccacagaaaaaccattattataagacgcacgatttttgaattagaaaaggctaaggccagagcgcatattttagagggctatttgatcgcactagacaatattgatgaaatcgtgcgactcattaaaacaagccaaagcccagaagcggctaaaaacgccttaatggagcgtttcactttgagcgagattcaaagcaaggccattttagaaatgcgtttgcaacgcttaacaggccttgaaagggataagatcaaagaagaataccaaaacttgttggagcttattgatgatctcaatggcattttaaagagcgaagatcgcttgaatggagtcgtcaaaacagagcttttagaagtcaaagagcaattttcttctccaaggcgcactgaaattcaagaatcttatgaaaatattgacatagaagatttgatcgctaatgagcctatggtagtgagcatgagttataaaggctatgtgaaaagagtggatttaaaagcttatgaaaagcaaaatcgtggtggtaaaggcaagctttcaggcagcacttatgaagacgatttcattgaaaacttttttgtggctaacacgcatgatattttgctctttatcaccaataaggggcaattgtatcatttgaaagtctataaaatcccagaagcgagccggatcgctatgggtaaagccattgtaaatttaatctcgctcgctccggatgaaaagatcatggcgactctaagcaccaaagactttagcgatgaacgctctttggccttcttcacgaaaaatggcgtggtgaagcgcaccaatttgagcgaatttgaaagcaacaggagttgtggtatcagagcgattgttttagatgaaggcgatgaattagtgagcgcaaaagttgtggataaaaacgctaagcatttgctcatcgcatcgcatttgggcattttcattaaattccctttagaagaggtgcgcgagatcggaagaactactcgtggggttataggcatcaagctgaatgaaaacgattttgttgtcggtgcggtcgttattagcgatgatggcaacaagcttttgagcgtgagtgaaaacgggcttggcaagcaaactttagccgaagcgtatagagggcaatctcgtggaggtaagggggtcattggcatgaagctcactcaaaaaaccggcaatctagtgggcgttatcagcgtggatgatgaaaatttggatttgatgatccttactgcaagcgcaaaaatgatcagagtttctattaaagatattagagaaaccggaagaaacgctagtggggtaaagctcataaacaccgccgataaagtcatgtatgtcaattcttgccctaaagaagaagagccagaaaatttagaaacctcttcggcacaaaatttgtttgag

SEQ ID NO: 66 - DNA, 819 bp, Artificial Sequence
  Description of Artificial Sequence:  Synthetic Primer
atggaatttatgaaaaagtttgtagctttagggcttctatccgcagttttaagctcttcgttgttagccgaaggtgatggtgtttatatagggactaattatcagcttggacaagcccgtttgaatagtaatatttataatacaggggattgcacagggagtgttgtaggttgccccccaggtcttaccgctaataagcataatccaggaggcaccaatatcaattggcatgctaaatacgctaatggggctttgaatggtcttgggttgaatgtgggttataagaagttcttccagttcaagtcttttgatatgacaagcaagtggtttggttttagagtgtatgggctttttgattatgggcatgccactttaggcaagcaagtttatgcacctaataaaatccagttggatatggtctcttggggtgtggggagcgatttgttagctgatattattgataacgataacgcttcttttggtatttttggtggggtcgctatcggcggtaacacttggaaaagctcagcggcaaactattggaaagagcaaatcattgaagctaagggtcctgatgtttgtacccctacttattgtaaccctaacgctccttatagcaccaaaacttcaaccgtcgcttttcaggtatggttgaattttggggtgagagccaatatttacaagcataatggcgtagagtttggcgtgagagtgccgctactcatcaacaagtttttgagtgcgggtcctaacgctactaatctttattaccatttgaaacgggattattcgctttatttagggtataactacactttt

SEQ ID NO: 67 - DNA, 1242 bp, Artificial Sequence
  Description of Artificial Sequence:  Synthetic Primer
atggcgatcttacgcgcaaaccttagccctaaaaacaaattaaacgccactttaaaagggtggctccccattttacaaagcgagcttgaagatttagaagaagtgttgaaacaaaacgctttagataaccccttaatcaaaattgaaaacaaacgcatcaaaaattttagcgatcgctttagcgctaaaaagagtagcgatcatttagaaaatttcgcaaccgcatctaaaagcctttttgaaaccttagaagctcaaatcattccccctctctttcctactgaaacctctcaaaaaatcgctatggatattatcagcgggttgaataatgaggggtattttgaagaaaatattgaagaaagggctagaattttaggggtagagagcgaagtttatgaaaaagtgcgcaagcgttttagttaccttaatcccgctggcattggtgctaaagatgtgaaagagagctttttattccagttagagagtagggaattagacgataatgagctttatgaagaaacgcgaaaaatcattttaaatttagaaaaacaccatgaattttctaaagatttttattatgaaaaggctttaaagattttaaaatcctttaaaaaccccccagccattgagtttttagaaaaagaaatagaagtcattcctgaactttttattgtagaagtggataatggaatcatcgtgcgtttgaatgatgagagctacccgacaatcagtttggaagaaaatcgctttaaggatagcggctatttaaaagaaaaattaaaagaggctaaagatttgattgatgcgctaaatttgagaaaagccacgatttataaaatcggtctgatgcttttagagtatcaatacgatttttttaagggtaaggaattacgccctttaaagctattagatttagccaatgagtttaaccactctgtaagcacgatttcaagggccatttctaataaatatttggcatgcgaaaggggggttttccccattaagcatttctttagcatcgccttagacaatagcgagacttcaaacgctgtgattaaagactatcttttagaattgatcaaaaacgaagacaaaaaagagcctttgagcgacgctaagattttagaactcattgaagaaaaattccatttgaaaatggtaagaagaacgatcaccaaataccgccaactgctcaacatcgcctcttcaagcgaaaggaaaaggctctatttgatgcgcgct

SEQ ID NO: 68 - DNA, 1734 bp, Artificial Sequence
  Description of Artificial Sequence:  Synthetic Primer
atgcaagttttagcgttaaaataccgccccaaacattttagcgagctagtcggtcaagagagcgtggctaaaacgctttctttagccctagacaaccagcgtttggctaacgcttatttattcagcgggttaagaggctcagggaaaaccagctcttctaggatttttgctagggctttaatgtgtgaagaagggccaaaggctgtgccttgcgatacttgcatccaatgccagagcgctttaaacaaccaccacatagatattatagaaatggatggggcgtctaatagggggattgatgatgtccgtaatctcatagagcaaacgcgctacaaaccaagctttgggcgctataaaatctttatcattgatgaagtgcatatgttcaccaccgaagcgtttaacgcgcttttaaagactttagaagagcctcctagccatgtgaaattccttttagcgacaacagacgccttgaaactgcccgctaccatactcagccgcacccagcatttcaggtttaaaaaaatccctgaaaattccgttatttctcatttaaaaaccattttagaaaaagaacaagtgagttatgaaacaagcgcgttagaaaaactggctcacagcgggcaagggagcctaagggatacgatcactcttttagaacaagccatcaattattgcgataacgctatcacagaaagcaaggtggctgaaatgttaggagcgattgacagaagcgttttagaagattttttccaaagcctaatcaaccaagatgaagcgcgattaaaagagcgttatgccattttagaaaattatgaaaccgagagcgttttagaagaaatgatgctttttttgaaagcgaaattattgagccctgatttttattctatccttttgatagagcgcttttttaaaatcattatgagcagtttgagccttttaaaagaaggggcaaatgccagttttgtgctgttgttattgaaaatgaaattcaaagaagctttgaaattcaaagccctagacgatgcgattttggaattagagcaaacccctttcaatcaaaaccctagcataagctataacgcccctaaacaagaatctaaaaatatagaaaaaagagaaaaaatagaacaaatagaaagaatagagggaacagaaaaaagagaaaaactagaaaaaaaagagaacgcagaaaccccgcaaactcccatgctttcagctaaagatcgcatttttcacaaccttttcaaacaagttcaaacattggtttatgagcgcaattatgagttaggggcggtgtttgaaaaaaatatccgtttcattgattttgacagccagactaaaaccttgacttgggagtctttagccactgataaggataaggagcttttaagagaacgatttaaaatcgtgaaaagtatcgttgatggggtttttggcaagggcgaaagtatcaaaatcgctttaaaaaatcattcagaaaataaaagcactttagaagtggttaaagagcttaaattcccttattcaaagcccaaaccaaccactgaaacgacggctgaaacgaaagaaaaagaaactaaagaaaaagagattcaagaaaacgacactaaagagattcaagaagtccaaccaaaacaagcccctacagcgttgcaagaattcatggctaaccactctgagctgattgaagagattaagagcgagtttgaaatcaaaagcgtggaattgtta

SEQ ID NO: 69 - DNA, 1044 bp, Artificial Sequence
  Description of Artificial Sequence:  Synthetic Primer
atgagaatatttttgaaattgttgattcttttattttgtttgaaggggcaggttatggctcaaaatttacccaccattgctttactggcgacaggggggacgattgcagggagtggtgcgagcgcgagtttgggtagttataagagtggtgagttgggcatcaaagagcttttgaaggctatccctagtcttaacagactcgctcgcattcaaggggagcagatttctaacatcggctcacaagacatgaatgaagaggtatggttcaagctcgccaaacgtgcccaagaattgctagatgatagccgtattcaaggcgtggtcatcacgcatggcacggacactttagaagagagcgcgtattttttaaacttagttttacgctccacaaaaccggtcgtgctggtgggagcgatgcgtaatgctgcttctttgagcgcggatggggctttgaatttatataatgctgtgagcgtagcgctcaatgaaaaaagtgcgaataaaggcgtgttagtggtgatggacgataatatttttagcgctagagaagtgattaaaacgcacaccacccacacttccacctttaaagccttaaatagcggcgcgatagggagcgtgtattatggcaaaacgcgctattacatgcagcctttgagaaaacacaccacagagagcgaattttccctttcacaactcaaaacccccctgcctaaagtggatattatttacacgcatgctggcatgacccctgatttattccaagcgagcctaaactcgcatgcaaaaggcgttgtgatagccggggtgggtaatgggaatgtgagcgctgggtttttaaaagcgatgcaagaagcgagccaaatgggggtggttattgttcgttctagcagggtaaatagcggtgagattacttcaggcgagattgatgacaaggccttcatcacaagcgacaatttaaacccccaaaaagctagggtgcttttacaactcgctttaactaaaacaaataataaagaaaaaatccaagaaatgtttgaagagtat

SEQ ID NO: 70 - DNA, 984 bp, Artificial Sequence
  Description of Artificial Sequence:  Synthetic Primer
atggactttaaaaataaaaaatggctttttctagcccctttagcaggctatacggatttgcctttcaggagcgtggtgaaaaaatttggcgtggatgttaccacgagcgaaatggtgagctcgcattcgttggtgtatgcgtttgataaaacttctaaaatgttggaaaaatcccctttagaagatcatttcatggcgcaaatttcaggctctaaagaaagcgtagtcaaagaagcggtggagaaaatcaacgctttagagcatgtgaatgggattgattttaattgcggttgtcccgctcctaaagtggctaatcatggtaatggtagtgggttattgaaggatttaaaccacttagtgaagcttttaaaaaccatcagagaaaacactagtaaaaaaatcacaagcgtgaaagtgcgtttaggctttgaaaagaaaatccctaaagaaatcgctcatgccctaaatgacgcaccggtggattatgtggtggtgcatgggaggacacgaagcgataaataccaaaaagacaaaatagattacgaaagcatcgctttaatgaaaaagattttaaaaaagccggtgatagccaatggcgaaattgacagcgtgaaaaaggcttttgaagttttacaaatcactcaagcggatgggctaatgatagggcgagcggccttaagagccccatggatattttggcaaatcagaaacaacaccacaaaattacccgcagtcgtgaaaaaagacctggttttagaacattttgataaaatggtggagttttatggggatatgggggtaatcatgtttaggaaaaatttgcatgcttacgctaagggcgaaatgcaagcgagcgcgtttcgtaactgcgtcaatacccttacagaaataaagagcatgcgagagagcatagaggaattttttaatcaagaaatgttgcaaagtgaagtgccgttatgggtagaattgaatcaaaaaagcgtt

SEQ ID NO: 71 - DNA, 2022 bp, Artificial Sequence
  Description of Artificial Sequence:  Synthetic Primer
atggcaataggttcattaagctcattagggcttggcagtaaggttttgaattacgatgtgattgacaagcttaaggacgctgatgaaaaggcgttaatcgcccccttagacaagaaaatggagcaaaatgttgaaaaacaaaaagcccttgtagaaattaaaacgctcctttcagctctaaaaggcccggttaaaacgctttcagattattccacttatatcagccgaaaaagcaatgttacaggcgatgcgttgagtgcgagcgtgggggttggcgtgcctattcaagatattaaagtggatgtgcaaaatttagcgcaaggcgatattaacgaattgggggcgaaattttcttcaagagacgatatttttagccaagtggataccacgctcaagttttacacacaaaacaaagactacgccgttaatattaaagcaggaatgactttaggcgatgtggctcaaagcatcacggacgctaccaatggcgaagtgatgggtattgtgatgaaaacaggagggaatgacccctaccaattaatggtgaataccaaaaacaccggcgaagacaaccgagtctattttggctcacacctccaatccacgctcactaacaaaaacgccctttctttgggggttgatgggagcggaaaaagtgaagtgagtttgaatttaaagggggctgatgggaacatgcatgaagtccccatcatgctagaactccctgaaagcgcttctatcaaacaaaaaaacaccgcaatccaaaaagcgatggagcaggctttagaaaatgaccctaattttaaaaatttgatcgctaatggggatatttccatagacactcttcatggaggggaatctttaatcattaatgacaggcgtgggggaaacattgaagttaaagggagtaaggctaaagagcttgggtttttacaaaccaccacccaagaaagcgatttattaaaaagctctcgcacgataaaagagggtaaattagaaggggtggtcagtttgaatggccaaaaactggatttgagtgctttaaccaaagagagcaacaccagtgaagaaaacacagacgctatcattcaagcgatcaacgctaaggaaggcttgagtgcgttcaaaaacgccgaaggcaagcttgtgatcaattctaaaaccggaatgctaacgattaagggcgaggacgctttaggcaaggccagtttgaaagatttgggtttaaatgctggcatggtgcaatcttatgaagcttcacaaaacacgctttttatgtctaaaaatttgcaaaaagcgagcgattcagcattcacttataatggggtgagcatcacacgccccactaatgaggtcaatgatgtgattagtggggttaatatcactttggagcaaaccacagagcctaataaacctgccattatcagcgtgagtagggacaatcaagccattatagacagccttactgaatttgtcaaagcctataatgagcttatccctaaactggatgaagacactcgttatgacgctgacactaaaatcgctgggatttttaacggcgtgggcgatattcgcgcgattcgatcttctcttaataatgtgttttcttatagcgtgcatacggataatggggtagaaagcttgatgaaatacgggcttagtttagacgataagggcgtgatgagtttggatgaggctaaattgagtagtgcgctaaattctaaccctaaagcgactcaagattttttctatgggagtgatagtaaggatatggggggcagagaaatccaccaagagggcattttttctaaattcaatcaagtcatcgctaatctcatagatggagggaacgctaaattaaagatttatgaagattccctagacagagacgctaaaagcctgactaaagacaaagaaaacgctcaagagcttttaaaaacccgctacaacattatggcggacgttttgccgcttatgatagccaaatctctaaagccaatcaaaaattcaattccgtgcaaa

SEQ ID NO: 72 - DNA, 1386 bp, Artificial Sequence
  Description of Artificial Sequence:  Synthetic Primer
atgcaaattgcaacagcaatatggaaaacaagaatttggcaactccaaacccattttgataaaaaagaagcgcatttgaagcatttagaagcacaacacaaagaatttgtaagagatgaaaaacgctatttagaaaaggaaaaaaaagagcttgaaaaagaacgccaaattttagaacaagaaaaagaaaattttaaaaaacagcgcgctgtttgtaaagaatctcaagccaaagcgctagacgcgatgctcaattacatggcttatactaaagatgaaattaaaagcatgattttagagcaattagaagaagaattagaagcccaaaaaagcgccttaatcaggcgttatgaaaaagaagccaaagaagagggcaagaaaaaatcgtatgccattttagcggaagcgacagcccgttttgcgggtaattatgcggcagagaatttaacaactcgtattgctttgccttgctcagattatatcggtcgtgtgataggcaaagacgggaaaaatattgaagcgtttaaaaaggtcagcggggtggatatagaatttagcgaagatagcagcgaattgtgtttgtccagtttcaatctttatcggcgtgaagtagcgagcgagacgcttaaaattttaatagaagacggccgtatccagcctaacaggattgaagaggtttatcatagagtcgcgcgcaacctggaaaaagaattgctttctgaaggggagagcgtggtgttagaattagagcttggagctatggaagatgagcttaaaattttaataggcaaaatgcgttatcgctccagttttgggcaaaacgccttacagcattctaaagaagtcgctcttttagccggcttgattgcagagcagcttgggggggataaaaaactcgctagaagagccggtattttgcatgatattggtaaagcgctcacccaagagcttgggagagatcatgtgaatttaggggttgaggtgtgcaagcgccataaagaagatccggttgtgatcaatgcgatttatgcccaccatgggcatgaagagattttgagcgtggagtgcgcgagcgtgtgcgcggctgatgcgctttcagcagggcgtcctggggctaggagaaagagcgatgaagaatacgctaaacgcatgcaagctttagaagagatcgcgctagaatttgatggggtggaaaaagcgtatgcgatggagagtgggcgagaattaagagtgattgtcaaatccaaccaagtcagggacaatcaagtgcctattattgccagaaagatcgctaaaaagatagaagagagcgctcagtatgtgggcgaagtgggcgtgcaagtggtgcgagaaagccgtttcaaaacgaccgctacgctcaagcaa

SEQ ID NO: 73 - DNA, 357 bp, Artificial Sequence
  Description of Artificial Sequence:  Synthetic Primer
atgcccatgcgtttgcacactgccttttttggtattaattcattgcttgttgcctctcttttgataagcggttgcagtctctttaaaaagcgtaacactaacgcccagctaatccccccttcagctaatggcttgcaagcccccatttatcccccaaccaatttcacccctagaaagagcattcagcctctcccaagccctcgccttgagaataacgatcagcccgtcattagttctaaccccactaacgctatccctaacacccccattctcacgcctaataatgtcattgaattgaacgcatgggcatgggcgtggctccagaatccaccatttcaccctctcaagccctggctc

SEQ ID NO: 74 - DNA, 1581 bp, Artificial Sequence
  Description of Artificial Sequence:  Synthetic Primer
atggaaaacaacccaaacaataaccaagcgtcattagaacgcaacgaattgcacaacaccatttggaaagtggctaacgaattgagaggctcagtggatggctgggattttaagcaatacgttttaggcattcttttttaccgctacatttcagaaaacatgactcattacatcaataaagaagagcgaaagcgcgatccgagttttgattacgctaaattaagcgatgaaaaggccgagcgtggaagaaaacaccttattgaacaaaaaggctttttcatcccgccaagcgctttattttgtaatgcgctaaaaaacgcgtgccataacgaagatctcaatgtaaccttacaaaatatttttaacgaaatagaaaaatctagccttggcactccatcagaagaaaatgtcaaaggcttgtttgcggatttagatgtcaatagcaataaattagggagctctcatcaaaatagggtggaaaaattgactaaaatccttgaagccatagggggcatgcaattaggcgattatttaaaaagcgggattgatgtttttggcgacgcttatgaatatttaatggccatgtatgcgagcaacgccggcaaaagcggaggggaatttttcaccccccaagaagtgagcgaactgctcgctaaaatcaccctacacggccaagagagcgtcaataaagtttatgacccatgctgtgggagtgggagcttactcttacaattttctaaagtgttaggcgataaaaatgtctcaaaagggtattttgggcaagaaatcaatttgaccacttacaacctttgccgtatcaacatgtttttgcatgacatcaattattctaaattccatattgcgcacggggacacgcttttagacccaaaacatgaagacgatgagccttttgatgcgatcgtttccaaccctccttattccactaaatgggtgggcgatagcaaccccattttaatcaacgatgagcgctttagcccggctggtgtgctagcgcccaaaaacgccgccgatctcgcattcactatgcacatgctttcttatttatccaatagcggcacggctgcgatcgtggaatttcccggggtgctttataggggaaacgctgaagcaaaaatcagagaatatttagtcaaagagaatgtcattgactgcgtgatcgctttaccagacaacctcttttttggaacgagtatcgctacttgcattttagtgcttaagaaaaacaaacaagacgacaccacgctttttattgatgcgagtaaggaatttgtcaaagagggcaagaaaaacaagctcaaagagcgcaaccgagaaaagattttgcaaacctatattgaaagaaaagagattaagcatttttgcgccctagctaatattgagaaaatcaaagaaaacgattacaatctctccgtgaatcgctatgtggagcaagaagacaccaaagaagccattgacattaaagcgcttaatagtgagattgctcaaatcgtagaaaagcaaagcgctttaaggaaccgtcttgaatccatcatcaaagagttagaaggggggcaaaatgca

SEQ ID NO: 75 - DNA, 1599 bp, Artificial Sequence
  Description of Artificial Sequence:  Synthetic Primer
atgctacaaaccatcaacttaacgcaacgctatgcgactaaaaaattgtttgaaaacgtgaatatcaagctggataaaaacaaacgctacgggcttattggggctaatggcgcaggaaagtccacttttttaaagattttaagcaagagcattgattgtagcagtggggaagtcatcattacaagcggcatgaaaatgggggttttagggcaggatcaatacgcttttgaagatttgagccttaaagatgcggttttgataggcaacaagcgtttgtatgacgctatcaaagaaaaagagcgcttatacaccgaaggcgatttgagcgatgataaagtgaatgccagattaggggagttagaaaccatttgcgtggaagaagatcccatgtatgaatgcgaagtggcgattgaaaaaatcctagaagatttaggcattcctagctctaaacacaacgatttgatgaaaaccctgccaagcagcgataaatttaaaatccttctcgctcaagtcttgttccctaaaccggatattttgcttttagatgagccgaccaacaacctggatttaaacgccattgaatggctagaaaacaacctcaaacgccatgaaggcacgatggtcgtcattagccatgacaggcattttttaaatgcggtatgcacgcatattttggatttggatttccacagcgtgcgcgaatttagcgggaattatgacgattggtatatcgcttccactctgatcgctaaacagcaagaggccgaacgcaataaaaaactcaaagaaaaagaagagctagaaaaattcatcgcgcgctttagcgctaacgcttctaaagccaagcaagccaccagccgccaaaaacaactggataaattagacattcaaagtttagcggtatctagcaggagggatcctagcattatttttaaacccaaacgcaccattggtaatgaagccttagagtgcgaaaacatctctaaaagttatgacgaccaaatcgttttaaatcaagtgagcttgaaagtgatgcctaaagacaagatcgccctcatagggccaaacggcgtgggtaaatccacgctttgtaaaattctagtagaagaattaaagccggataagggcgtggtgaaatggggggcgacggtttcaaaaggctatttccctcaaaacgtgagcgaagaaattagcggggaagagaccttgtatcaatggctctttaacttcaataaaaagattgaaagcgctgaggttaggaacgctttagggaggatgctgtttaatggcgaagagcaagaaaaatgcgtgaacgctttaagtgggggcgaaaaacaccgaatggttttatccaagctcatgctagagggggggaattttttagtcttagatgagccaaccaaccatttggatttagaagcgattatcgctttaggcgaagcgctctttaaatttgatggggcgctgatttgcgtaagccatgacagagagctcattgatgcgtatgctaataggatcattgaattagtcccaagccctaaaggcgcttcaatcattgattttaaaggcagttatgaagagtatttggcgagcaaaaaa

SEQ ID NO: 76 - DNA, 1626 bp, Artificial Sequence
  Description of Artificial Sequence:  Synthetic Primer
atgaataaaccatttttaatcttactcatagccctaattgtctttagcggctgtaacatgagaaaatatttcaaacccgctaaacaccaaattaaaggcgaagcgtatttccctaaccatttgcaagaaagtatcgtttcgtctaatcgttatggagccattttgaaaaatggagcggttataggcgataaaggtttaacgcagctaagaatcggtaagaacttcaattacgaaagcagttttttaaatgagagtcaagggttttttattcttgcgcaagattgtttgaacaagattgataaaaaaacaaacaaaagcaaggtggctaagactgaagaaacggaattgaaattaaagggcgttgaagcggaagtccaagataaagtctgtcatcaagtggaattgattagcaataaccctaacgccagccaacaatctatcgttattcctttggagacttttgccttgagcgcaagcgttaaagggaatcttttagcggtggtgttagcggacaattcagcgaacttatacgacatcacttctcaaaaattgctttttagtgagaaaggttccccaagcaccacgatcaattctttaatggcgatgcctatttttatggatacggtcgtggtgttccccatgctagatgggcgcttgttggtcgtggattatgtgcacggaaaccctacgcctattagaaacattgttatcagcagcgataagttttttaacaatatcacctaccttatcgtagatggcaataacatgatcgcttctacagggaaaaggatactctcagtagtgagcggtcaagagttcaactatgatggggatattgtggatttgctttatgataaggggactttatatgtgctcacgctagacgggcagattttgcaaatggataagagtttgagggaattaaacagcgtgaaactgccttcgtcgctcaacacgattgtattaaaccataataaattgtattctttagaaaaacgagggtatgtgatagaggtggatttaaatgattttgattcgtataatgtctataaaacgccaactataggcagttttaagtttttttcatctaatcgtttggataaaggggtgttttatgataaaaatcgggtgtattacgatcgctactatttagattataacgattttaaaccaaaactttatcccgttgtggaaaaatcggcatctaaaaaatctcaaaaaggcgaaaaagggaacgctcctatttatttgcaagaaaggcataaagctaaagaaaataaacagcctttagaagaaaacaaagttaaaccaagaaatagcgggtttgaagaagaagaggttaaaaccagaaggcctgagcctattagggatcaaaataacgccacccaacaaggcgaaacaaaaaacaatgaaagtaaaaacgctcctgtcttaaaagaaaacgccgctaaaaaagaagtgccaaaaccaaattctaaagaagaaaaacgccgcttgaaagaagaaaagaaaaaagccaaagccgaacaaagagcgagagaatttgaacaaagagcgagagagcatcaagaaagagatgaaaaagagcttgaagaaagaagaaaagctttagaaatgaataagaag

SEQ ID NO: 77 - DNA, 873 bp, Artificial Sequence
  Description of Artificial Sequence:  Synthetic Primer
atgaaacgaagggattttattaaaacgactactttaggcgctacaggtgctgttttaggagcacagattttgcaggcagaagaaagtaaagggagtgttgcaaaatataaaatagaagctcaatacagcattgattttgattctgcagaacacacttcacttttcattcccatgccgagtgttgtagcgagcaatgtgcatttacaaggcaatcatgctagctataaaagcatgctcaattttggagtgccttatttgcaagtggattttttaaaaagcactcaaaaaaagcaagtccatttgtcttatgagatcgctagctatcaattgaatgagcgtttgtttgaaacgagcgattttgtagcaatggggcgttatgaaagagacgatgcgagcgtggctaacattgccaaccagcttaagggaacaacccctaaagaaagcgttcgcaatttttatgcgttcatcaagcatgagatgcctaagagacagaaggctttagagggtaaagaaaatttacctaagcgtgagagtttgccctggtttgcaaccatttcaaaagagagcatgtttgtgtccttatgccatgcgtgcgggattaaaagcgctgaagtgcaaggcttgaaactgggtcaaaacagcgtggtgaaaaacgctcctagagtggaagtgtatttgaaagattcatttctagcgtttgattttcaaaataatcacaaggaagtttttatcccgttgaatcgtcataaagacatgcagttagattctgccttattggcgacttttggcgatgcttttgcccttgtggatggtagggatttaggcaattacgagagcaaactttttgaaaaaagagtgtcctatacgattgtc

SEQ ID NO: 78 - DNA, 1515 bp, Artificial Sequence
  Description of Artificial Sequence:  Synthetic Primer
atggttaataaagatgtgaaacaaaccactgcttttggcgctcccgtttgggatgacaacaatgtgattacggccggccctagaggtcctgttttattacaaagcacttggtttttggaaaagttagcggcgtttgacagagaaagaatccctgaaagggtggtgcatgctaaaggaagcggagcttatggcactttcactgtgactaaagacatcactaaatacactaaagcgaaaattttctctaaagtgggcaaaaaaaccgaatgcttcttcagattttctactgtggctggtgaaagaggcagtgcggatgcggtgagagaccctagaggttttgcgatgaagtattacactgaagaaggtaactgggatttagtggggaacaacacgcctgttttctttatccgtgatgcgatcaaattccctgatttcatccacactcaaaaacgagatcctcaaaccaatttgcctaaccatgacatggtatgggatttttggagtaatgttcctgaaagcttataccaagtaacatgggttatgagcgataggggtattcctaaatctttccgccacatggatggttttggcagccacactttcagtcttatcaacgcgaaaggcgaacgcttttgggtgaaattccactttcacaccatgcaaggcgttaagcatttgactaacgaagaagccgcagaagttaggaagtatgatccggattccaatcaaagggatttattcaatgcgatcgctagaggggatttcccaaaatggaaattaagcattcaagtgatgccagaagaagatgctaagaagtatcgattccatccgtttgatgtaactaaaatttggtatctccaagattatccattgatggaagtgggcattgtggagttgaataaaaatcctgaaaactatttcgcagaagtggaacaagcggcattcagtccggctaatgtcgttcctggaattggctatagccctgataggatgttacaagggcgcttgttctcttatggagacacacaccgctaccgcttaggcgttaattatcctcaaataccggttaataaaccaagatgcccattccactcttctagcagagatggttacatgcaaaacggatactacggctctttacaaaactatacgcctagctcattgcctggctataaagaagataagagcgcgagagatcctaagttcaacttagctcatattgagaaagagtttgaagtgtggaattgggattacagagctgatgatagcgattactacacccaaccaggtgattactaccgctcattgccagctgatgaaaaagaaaggttgcatgacactattggagagtctttagctcatgttacccataaggaaattgtggataaacaattggagcatttcaagaaagctgaccccaaatacgctgagggagttaaaaaagctcttgaaaaacaccaaaaaatgatgaaagacatgcatggaaaagacatgcaccacacaaaaaagaaaaag

SEQ ID NO: 79 - DNA, 2373 bp, Artificial Sequence
  Description of Artificial Sequence:  Synthetic Primer
atgtttttaagagtatacccaaagcttagatacgctttatgtttccccctactcgctgagacttgctatagcgaagagcggactttaaataaggttaccacccaagctaaaaggattttcacttacaacaatgagtttaaagtaacttctaaagaactagatcaacgccaaagcaatgaagtcaaggacttgtttaggactaaccctgatgtgaatgtgggcggagggagcgtgatggggcagaaaatctatgtgagaggcgttgaagacaggcttttaagggttacagtggatggggctgcacaaaatggcaatatctaccaccaccaaggcaacaccgtgattgaccctggcatgctcaaaagcgtggaagttaccaaaggcgcggcgaatgcgagcgcggggccaggagcgattgcgggagtgattaaaatggagactaaaggagcggctgattttatccctagggggaaaaattatgctgccagtggggcggtgagtttttataccaattttggcgatcgagagactttcagatcggcttatcaaaacgcgcattttgatattatcgcttactacacgcaccaaaacatcttctattatagaagcggcgctacagcgatgaaaaaccttttcaatcccacacaagccgataaagagccaggaactcctagcgagcaaaacaacgctttgattaaaatgaatggttatttgagcgacagagacacgctcactttcagctggaacatgacacgagataacgctacacgccctttaaggagtaacgctatagggttagcctatccttgtgaagccccctttagtcctgatagttctcaagggtgtcctaatgtgttagatagtttcacaagatacatgtatcactctattaatagtgccaacaatctttccttacaatacaaaagggaagcgggaaattcttttggcgacccacgattagattttaccctttatacaagcatcaggaacgctcagtttgatcccctatttgatcctaatggcgtttatgctaaattccccacttctttagcgagcgcatgggaaaaagaaaattacccatgcgttgaaggcgcttattgcaccccaagcttttcagatgtggataaaccaagctcacagcctaggaatttgtttttaaacaacaccggcttaaaccttaaagtcgcgcatgtgattgatgaagccacagacagcctttttgaatacggattcaactaccaaaatttgagcgtttttgacgctcgcatccctaaatcagaattatacaggcctaatcaagtttatactgatgataaaggacaaaaacaaatcgcttgctctcttgtgaataataaccccaatgaccccactctgtgccaaagagggaaagcgaacgggaatatttatggaggctacgtgcaagcgaattactcgcctcataaaatcatcacttttggagccggggtaaggtgggacgcttacacgctttatgataaagactggaaccaccgctacactcaaggctttagccctagcgcggctcttgtgctaagccccattgagcctttatctttaaaaatcacttattctcaagttacaagaggggtgatgccaggagatggcgtgtacatgcgtcaaaacgatttacgatacgccaaaaacatcaagcctgaagtgggctctaacgctgaatttaatattgattattcaagccagtattttagcgggagggctgcggcgttttatcaggctttggataatttcatctcacaatacgcacaaaatttgattgtaaccaatttgagtcaagcgattcgtatttatggctatgaagtgggtgggactttcagatacaagggcgtgagtttgaatgtaggggtctcgcgcacctggcccaccactagggggtatttaatggcggatagctatgagcttgccgcaagcaccggtaatgtttttatcatcaaattggattacaccatccccaaaacagggatcaatcttgcatggcttagccgctttgttaccggtttagattattgcgggtttgatatttacttgcctgattatgggacggctgagaaacccaaaacccctaccgatttagccaaatgcggatctcaattagggttagtgcatatgcataaaccgggctatggcgtgagtaatttttatatcaattggagtcctaaaaccaaaagccgctggaagggtttgttgctttcagccgtgtttaataatgttttcaacaaattctatgtggatcaaacaagcccttatgtcatgagcccggatatgccaggcactgacgctgttaaaagagcgatcgctgagcctgggtttaacgcgcgttttgaagtggcttacaaatgg

SEQ ID NO: 80 - DNA, 3870 bp, Artificial Sequence
  Description of Artificial Sequence:  Synthetic Primer
atggaaatacaacaaacacaccgcaaaatcaatcgccctttggtttctctcgctttagtaggagcgttagtcagcatcacaccgcaacaaagtcatgccgcctttttcacaaccgtgatcattccagccattgttggggggattgctacaggcgctgctgtaggaacggtctcagggcttcttggctgggggctaaaacaagccgaagaagccaataaaaccccagataaacccgataaagtttggcgcattcaagcaggaaaaggctttaatgaattccctaacaaggaatacgacttatacagatccctactatctagtaagattgatggaggctgggattgggggaatgccgctacgcattattgggtcaaaggcgggcaatggaacaagcttgaagtggatatgaaagacgctgtagggacttataatctctcagggctaagaaactttactggtggggatttagatgtcaatatgcaaaaagccactttgcgcttgggccaattcaatggcaattctttcacaagctataaggatagcgctgatcgcaccacgagagtggatttcaacgctaaaaatatcttaattgataattttttagaaatcaataatcgtgtgggttctggagccgggaggaaagccagctctacggttttaactttgcaagcttcagaagggattactagcagtaaaaatgcggaaatttctctttatgatggcgccacgctcaatttggcttcaaacagcgttaaattaatgggtaatgtgtggatgggccgtttgcaatatgtgggagcgtatttggccccttcatacagcacgataaacacttcaaaagtgacaggggaagtgaattttaaccatctcactgtgggcgatcacaacgccgctcaagcaggcattatcgctagtaacaagactcatattggcacactggatttgtggcaaagcgcgggactaaacattatcgcccctccagaaggcggttataaggataaacctaaggataaacctagtaacaccacgcaaaataatgctaacaacaaccaacaaaacagcgctcaaaacaatagtaacactcaggttattaacccacccaatagcgcgcaaaaaacagaaattcaacccacgcaagtcattgatgggccttttgctggtggcaaagacacggttgtcaatattgatcgcatcaacactaacgctgatggcacgattaaagtgggagggtataaagcttctcttaccaccaatgcggctcatttgcatatcggcaaaggcggtatcaatctgtccaatcaagcgagcgggcgcacccttttagtggaaaatctaaccgggaatatcaccgttgatgggcctttaagagtgaataatcaagtgggtggttatgctttggcaggatcaagcgcgaattttgagtttaaggctggtacggataccaaaaacggcacagccacttttaataacgatattagtttgggaagatttgtgaatttaaaagtggatgctcatacagctaattttaaaggtattgatactggtaatggtggtttcaacaccttagattttagtggcgttacaggtaaggtcaatatcaacaagctcattacggcttccactaatgtggccgttaaaaacttcaacattaatgaattggttgttaagaccaatggggtgagtgtgggggaatacactcattttagcgaagatataggcagtcaatcgcgcatcaataccgtgcgtttggaaactggcactaggtcaatcttttctgggggtgtcaaatttaaaagcggtgaaaaactggttatagatgagttttactatagcccttggaattattttgacgctaggaatattaaaaatgttgaaatcaccagaaaattcgcttcttcaaccccagaaaacccttggggcacatcaaagcttatgtttaataatctaaccctgggtcaaaatgcggtcatggactatagtcaattttcaaatttaaccattcagggggatttcatcaacaatcaaggcactatcaattatttggtccgaggcgggcaagtagccaccttgaatgtaggcaatgcggcagctatgttctttagtaataatgtggatagcgcgactgggttttaccaaccgctcatgaagattaacagcgctcaagatctcattaaaaataaagaacatgtcttattgaaagcgaaaatcatcggttatggcaatgtttctttaggcactaacagcattagtaatgttaatctaatagagcaattcaaagagcgcctagccctttacaacaacaataaccgcatggatatttgtgtggtgcgaaatactgatgacattaaagcatgcgggacggctatcggcaatcaaagcatggtgaataaccccgacaattacaagtatcttatcggtaaagcatggaagaacatagggatcagcaaaacagctaatggctctaaaatttcggtgtattatttaggcaattctacgcctactgagaaaggtggcaataccacaaatttacctacaaacaccactagcaatgtgcgttctgccaacaacgcccttgcgcaaaacgctcctttcgctcaacctagcgccactcctaatttagtcgctatcaatcagcatgattttggcaccattgaaagcgtgtttgaattggctaaccgctctaaagatattgacacgctttatgctaactcaggcgcgcaaggcagggatctcttacaaaccttattgattgatagccatgatgcgggttatgccagacaaatgattgataacacaagcaccggtgaaatcaccaagcaattgaatgcggccactaccactttaaacaacatagccagtttagagcataagacaagcagcttacaaactttgagcttgagtaatgcgatgatcttaaattctcgtttagtcaatctctccagaaggcacaccaataatattgactcattcgcccaacgcttacaagctttaaaagaccaaaaattcgcttctttagaaagcgcggcggaagtgttgtatcaatttgcccctaaatatgaaaaacctaccaatgtttgggctaacgctattgggggaacgagcttgaataatggcggcaacgcttcattgtatggcacaagtgcgggcgtagatgcctaccttaatggggaagtggaagccattgtgggcggttttggaagctatggttatagctcttttaataatcaagcgaactctcttaactctggagccaataacactaattttggcgtgtatagccgtatctttgctaaccagcatgaatttgattttgaagctcaaggggcgctagggagtgatcaatcaagcttgaatttcaaaagcgctctattgcgagatttgaatcaaagctataattacttagcctatagcgctgcaacaagagcgagctatggttatgactttgcattttttaggaacgctttggtgttaaaaccaagcgtgggcgtgagctataaccatttaggttcaaccaactttaaaagcaatagcaatcaagtggctttgaaaaatggctctagcagtcagcatttattcaacgctagcgctaatgtggaagcgcgctattattatggggacacttcatacttctatatgaacgctggagttttacaagaatttgctaactttggttctagcaatgcggtatctttaaacacctttaaagtgaatgccgcacacaatcctttaagtacccatgccagagtgatgatgggtggggaattaaaattagctaaagaagtgtttttgaatttgggctttgtttatttgcacaatttgatttccaatataggccatttcgcttccaatttaggaatgaggtatagtttc

SEQ ID NO: 81 - DNA, 522 bp, Artificial Sequence
  Description of Artificial Sequence:  Synthetic Primer
atgcctcaaatacaatcatcgcattccaatcattttgatttcactatagacacggcggatcgcactaaattattgatgagctatttagtcgtgcctacaacggctaatttcaacaatgtcatgcatgggggggaattattgaatttattggataaagtggcttatgtgtgttcgactcgttattgcgctaaaggaacggtcactttaagcgtggatggggttacttttaaataccccattcctgtagggaatttgctcacttttttagccagcatcaattatgtgggcaacacctcgtgcgaagtggggattaaggttttgagcgaagacattaaaactcgtgaaatcacgcacacgaactcatgttatttcaccatggtggctgtagaaaatggcaaacccacccccatgcctaaatacgagcctaaaacagaggttgaaatccgccgttatgaaggggctttaaagcgcaaggaaatgcgcacacgagggtatttaaaaagcgggaaacacgagggtgtt

SEQ ID NO: 82 - DNA, 1137 bp, Artificial Sequence
  Description of Artificial Sequence:  Synthetic Primer
ttgaataatttagacattaaaactttagggcaggttttcacccctaaaaagatagtggatttcatgctcactctcaaacacaatcatgggagtgttttagaaccgagtgctggcgatgggagttttttaaagcgcttaaaaaaggccgtaaggattgaaatcgatcctaaaatctgccctaaaaatgccctttgcatggacttttttgactaccctttagaaaatcaatttgacaccattattggtaacccgccctatgtcaagcacaaggatattgcgccaagcaccaaagaaaaactccattacagcctttttgatgaaaggagtaatctctacttgtttttcatagaaaaagcgatcaagcatttaaaacctaaaggcgaattgattttcatcaccccaagggattttttaaaatccacttctagcgtgaaattaaacgaatggatttataaagaaggcacgataacgcatttttttgaactgggcgatcaaaaggttttcccaaacgccatgcctaattgcgtgatttttcgtttttgtaagggtaatttcagtagaatcaccaacgatggtttgcaatttttgtgcaaaaaaggcattttgtatttcctcaaccaatcttacacgcaaaaattaagcgaggtttttaaggttaaagtgggggcagtgagcgggtgcgataagatttttaaaaatgaaaaatacgggaatttagaatttgtcacctcaatcacgaaaagaaccaatgctttagaaaaaatggtttttgtcaatgagcctaatgattatttactccagcataaagacagcttaatgcaaagaaagattaaaaaattcaatgaaaataactggtttgagtgggggagaatgcatcacatatcccctaaaaaacgcatttatgtcaacgccaaaacgcaccaaaaaaaccccttttttatccaccaatgccctaattatgacggctctattttagcgctattcccttataaccaaaacctggacttacaaaatctctgcgacaaactcaacgctatcaactggcaagaattaggctttgtgtgcggcgggcgttttttgttttcgcagcgctctttagaaaacgcgcttttgcctaaagactttttaaatctagga

SEQ ID NO: 83 - DNA, 1587 bp, Artificial Sequence
  Description of Artificial Sequence:  Synthetic Primer
atgaaacaaaatttaaagccattcaaaatgattaaggaaaatttaatgacacaatctcaaaaagtaagattcttagcccctttaagcctagcgttaagcttgagcttcaatccagtgggcgctgaagaagatgggggctttatgacctttgggtatgaattaggtcaggtggtccaacaagtgaaaaacccgggtaaaatcaaagccgaagaattagccggcttgttaaactctaatacgacaaacaacaccaataccaatattgcaggcacaggaggcaatgtcgccgggactttgggcaacctctttatgaaccaactaggcaatttgattgatttgtatcccattttgaacactaaaaatatccatcaatgtggtactactaataatggtagtagtagtgcgaccactgcagccgctactactaacaatggcctttgtttccaaggtaacctggatctttataacgaaatggttggctctatcaaaactttgagtcaaaacatcagcaagaacatctttcaaggcaacaacaacaccacgagccaaaacctctccaaccagctcagtgagcttaacaccgctagcgtttatttgacttacatgaactccttcttaaacgctaacaaccaagcgggtgggatttttcaaaacaacactaatcaagcttatggaaatggtgttaccgctcaacaaatcgcttatatcctaaagcaagcttcaatcactatggggccaagcggtgatagcggggctgccgcagcgtttttggacgccgctttagcgcaacatgttttcaactccgctaacgccgggaacgatttgagcgctaaggaattcactagcttggtgcaaaacatcgtcaataattctcaaaacgctttaacgctagccaacaacgctaacatcagcaattcaaccggctatcaagtgagctatggcgggcatattgatcaagcgcgctctacccaactgttaaacaacaccacaaacactttggctaaagttaccgctctaaacaacgagcttaaagctaacccatggcttgggaatttcgctgccggtaacagctctcaagtgaatgcgtttaacgggtttatcactaaaatcggttataagcaattctttggggaaaacaagaatgtgggcttacgctactacggcttcttcagctataatggcgcgggcgtgggtaatggccccacttacaatcaagtcaatctgctcacttatggggtggggactgatgtgctttacaatgtgtttagccgctcttttggtagccgaagtcttaatgcgggcttctttggggggatccaactcgcaggggatacttacatcagcacgctaagaaacagccctcaacttgcgaatagacccacagcgacgaaattccaattcttgtttgatgtggggttacgcatgaactttggtatcttgaaaaaagacttgaaaagccataaccagcattctatagaaatcggtgtgcaaatccctacgatttacaacacttattataaagctggcggcgctgaagtgaaatacttccgcccttatagcgtgtattgggtctatggctacgccttc

SEQ ID NO: 84 - DNA, 7587 bp, Artificial Sequence
  Description of Artificial Sequence:  Synthetic Primer
atggcgtttaaaaaggccaggttgatttccaagtttatttcaaagggatctttcaaattgaataagatctcaaagaaaattttcacattgaatcaaatcttaaaatgtgaaaagcccttaaaacgccataaaaaagctttaaaacctattaaaaagctctctaatcgcaacaaatcttttttaaaagcttcggttttattgataggagcgttaggggggttatcccacctaagggctaacgaatgccgttattggtcatggtcgtcttggagttaccaagataatattgaaagcggtcctaattcgcccacgcacaactcttattgcctttttagtagcactcaaggctctgggacttattatttaaacactcttaccacttatagcgctggtggggctagtttcacgcaaaaattcaataacggcacgcttaatgtgggagagaatatccgctttggaggcacaggtattaatgggggtgatgtcggctatatcacaggaacttatgacgctcaaacgattaattttaattctagccatttaacaaccggaaactcatacgctgatggtggtggggccacgctcaattttaatgcggccaataatatcactatcaatcaagcgagttttgacaatagccatgcagggacgcaaaaatcttacatgaattttaaaggctctaatatcaaggtcagtggctctagttttacagatgatactgatgggggctttagtttcagcggtaatagtaataacagcaccatctcctttaatcaaacgagcttcaatcaagggacttatcactttagtaatagcgccactttaagcttcaatcatagcgctttcaatcaagggacttataactttaatagcactcaatctgcttttaataacagcgctttcaatcaagggacttatcatttcaatggcaacgccagctttgataacgacaccttcaatcaaggcacttatagctttaataccagcaaggtgagtttctcaggcatcaacactttaaattcaagttcgccttttgctagccttaaaggcagtgtgtcttttggttctgatgcgatttttaacctcaatcaaacccttaataatcaaacctatgatattctcactacaaacggggcgatccagtatggggtttatcaaagctatttgtgggatctaatcaactataagggcgataaagccattagccatgttgaagtgggcaataacacttatgatgtaacctttgatattaacgggcaagatgaaaccttacaagaaacctttaacaaacaatccattattacccaatttttaggagatgatttacaacaacaagcccaaaaaacctaccaacaagacttgagcaactcccaaagcgctttaaataacgctgctagtgataataagatcgcaaatagcgatacagactacaccaagaataaaaacgccactatcaaaaaagacgctcaaggtttagaaaacaccaaccaacaaatcgctcaagatgaacaagcgttacaaggagatttagacaagctcaaacaattagccaactccccaacaggctttagtgaacaagctttcaatcaagctcaaaaacaagaacaacaagatgaacaaaccttacaaaacgaagaaaagacttttaatagcgagcaagagggattgaaacaagcgatacaacaagcacaagcccaacaacaaaaacaacaacaaaaacaagaacaacaacaagcccaacaaacctatcaagaggatctcactcattcccaaagcgctttgaatgatgtggctagcgacaacacgatcgcaagcaatgatacaaactacaccaacaatcaaaacaccgctatcaaagaagacgctcaaggtttagaaaacaccaaccaacaaatcgctcaagatgaacaagcgttacaaggagatttagacaagctcaaacaattagccaactccccaacaggctttagtgaacaagctttcaatcaagctcaaaaacaagaacaacaagatgaacaaaccttacaaaacgaagaaaagacttttaatagcgagcaagagagattgaagcaagcgatagctaacgctaagcctacaagccccacaccaagccatgcacccactcctacaaaacacaccgcgccaaacactcctcctaataaagttccacccacaccccctactcaaaatccacctgcagaaagcgtgtggagtggggtttattggcttcaaaacaaaacctactcaaacaaaggcatttattatattgatcccaatctttcaggacagagcggtcaaagcggcaacacgctcagcacttatacagctaatttgtttggaagaagttttagcgttaatatccaaaatggcactttgatcatagggaataatacagagagcgtgaatagtaatgggttgatttggatagggcatggaggttttggctatattacgggaacttttagtgcggctaacatttacttgaccaataattttaaaaccggtgaaggcgtttcaaattcagatggtgggggagcgaacattacctttaaagcaagcgataatatcactatggatggcttgaattataatgacgctgaaaccgttactaaaatgattcaaacaggggctagccagcattcctatgccacttttgacgctctaaataatatcagcgtgactaattccagttttagcgatatgacttggggaaaattcagttttagcgctaagaatatttcgttttctaacgcttcgttcagcggctttacaaaccctggaggatcaagcgttattagcgctaacgctactaattctttaagctttatcaattctcgtttgaatgggggagcggtttataatttgcaggctaatagccttattttcaataacacgcaagcggtttttaatgtcttgtattctagggggacaagcaattttaacgccaccacacagcttttaggcaacacgaattttacgctcagttctcaaagtttgttgaattttaatggcgatacaaccttgcaaaacaacgccaatatcacgcttggcaataaaagtcaagccgcttttaaaaattctttaacgcttgataataattctaatttgagtttagacaatcaaagcgttttgaatgcgaataacacaagcgcttttaacaatcaagcgagtctcaatatttataacgggagtcaagcgacctttaatagcctcttttttaatggcgggacactcagtcttaacgctagtagcaagctcaacgcttctaacgctagtttttcaaacaacaccactatcaatttagacgatagcgttttatcggctagtaacacaagctctttaaacgctaatatcaattttcaaggcgcaagccaggctgattttggaggcaacacgattattgatacagcgagctttaattttgacagcgcaagttcattgaattttaacaaccttacggctaatggagcgttaaattttaatggttatacgccctctttgactaaggctttaatgagcgttagcgggcagtttgttttagggaataatggggatattaatttatctgacatcaatatttttgataacatcacaaaatctgtaacctacaacatcctaaacgctcaaaaagggattactggcatcagtggggctaatggctatgaaaaaatccttttttatggcatgaaaatccaaaacgctacctatagcgacaacaataacatccaaacttggtcgtttataaaccctctcaattcttctcaaatcattcaagagagcattaaaaatggggatttaaccatagaagttttaaataaccccaactcggcttccaacactattttcaatatcgctcctgagctttataattaccaagcttctaagcaaaatcctaccggctatagctatgattatagcgacaatcaagcaggcacttattacttgacaagcaacattaaaggtcttttcacccctaaaggctctcaaactcctcaagccccaggcacttatagcccgtttaaccagcctttgagtagtttgaatatctacaataagggtttttctagcgagaatttaaaaacgcttttagggatcctttctcaaaattccgctaccttaaaagaaatgattgaatccaaccaactagacaatatcactaacattaatgaagtgttgcaactcttagacaagattaaaatcacccaagtgcaaaagcaagcactcctagaaacgatcaaccatttgactgacaacatcaatcaaacctttaataatgggaatctaattataggcgctactcaagataatgttacaaactctactagctctatatggtttgggggcaatggctatagcagtccttgcacgctagatagcgccacttgttcttcttttagaaacacttacttagggcaattattaggctcaacttccccctatttaggctacattaacgctgattttaaagctaaaagcatttatattaccggaacaattggaagtggtaacgcctttgaaagcggagggagcgcggatgtaacctttcaaagcgctaataacttagtgttgaataaagccaacatagaagctcaagctacagacaatatctttaatcttttgggccaaaaagggattgagaaaatctttaatcaagggaatttagcgaatgttctcagtcaagtggctatggaaaaaatcaagcaagccggcggtttaggaaactttatagaaaacgctctaagccctttgagtaaggaattgcccgctagcttgcaaaatgaaaccttaggccaacttataggtcaaaataacttagatgatttattgaataatagcggggtcatgaatgcaatccaaaatattatcagtaaaaaactaagcatttttggtaattttgttaccccatccatcatagaaaactaccttgctaagcagtctttaaaaagcatgctagacgataaagggcttttgaattttatcggtgggtatatgaacgcttctgaattaagttctattttaagcgtggttttaaaagatattactaatccccctacaagcttgcaaaaagacatcggtgtggtagcgaacgacttgttgaacgagtttttaggacaagatgttatcaaaaagctagaaagtcaaggcttagtgagtaatatcattaataatatcatttctcaaggcgggttaagcggcgtttataatcaaggtttagggagcgtgttgccgccctctttacaaaacgcgctcaaagaaaacgatttaggcactcttttatcgcctagaggcttgcatgatttttggcaaaaagggtattttaactttttaagcaatggctatgtttttgtcaataacagctcttttagcaacgctacaggaggcagtttgaattttgtcgccaacaagtctattatttttaatggcgataatacgattgactttagcaagtatcagggcgcattgatttttgcttctaatgatgtttctaatatcaatatcaccaccctaaacgctactaatggcttaagccttaatgcgggtttgaataacgtgagcgttcaaaaaggggaaatttgtgtcaatttagccaattgccccacaaccaaaaacagctcttctacaaactctagcgtaacccccactaatgaatctttaagcgtgcgcgctaacaacttcactttcttaggcgcaatcgcttctaatggggctattgatttgtctcaagtgaaaaataatagcgttatagacacgctcaatcttaatgaaaatgcggccttgcaagccaataatttaacgatcactaacgcttttaacaacgcctctaactctacagctaacattaatggtaatttcaccttaaaccaacaagcgaccttaagcactaacgctagtggcttgaatgtcatggggaattttaatagctatggcgatttggtgtttaacctcagccattcagttagccatgccattatcaacgctcaaggcagtgcgacaatcatggctaataacaataaccccttaatccaattcaacacttcttcaaaagaagttggcacttacacgcttattgatagcgctaaagccatttattacgggtataacaaccaaatcacaggaggcagtagcctagataattaccttaagctttacactcttattgatattaatggcaagcacatggtgatgactgacaacggcttaacctataacgggcaagccgtgagtgttaaagatggcggtttagttgtgggctttaaagactctcaaaatcaatatatttacacttccattctttataataaagtgaaaatcgctgtttctaatgatcctatcaataacctacaagcccccactttaaaacaatacatcgctcaaattcagggcactcaaggcgtggatagcattgatcaagctggaggcagccaagcgattaattggctcaataaaatctttgaaactaagggaagtcctttattcgctccctattatttagaaagccattccacaaaagatttaaccacgatcgctggagatattgctaacactttagaagtcatcgctaaccctaattttaaaaatgacgccaccaatattttacagatcaacacctacacgcagcaaatgagccgtttagccaagctctctgacacttcaacttttgctagcgctgattttcacgagcgattagaagcccttaaaaacaagcgattcgctgatgcgatccctaacgctatggatgtgattttaaaatactctcaaagaaacagagtcaaaaataatgtatgggcgacaggagttggaggggctagtttcattaatggaggcactgggactttatatggtatcaatgtagggtatgaccgatttattaagggcgtgattgtggggggttatgccgcttatgggtatagcgggtttcatgcaaacatcactcaatcaggctctagcaatgtcaatatgggtgtttatagccgagcgtttatcaaaagaagcgaattaacgatgagcttgaatgagacttggggatacaataagactttcatcaactcttatgaccccctactctcaatcatcaatcagtcttacaaatacgacacctggacgactgacgctaaaatcaattatggctatgatttcatgtttaaagataaaagcgttatttttaaacctcaaataggcttagcctattattacattggtttgtctggtttaaggggcattatggatgatcctatttacaatcagttcagagccaatgctgatcctaataaaaaatccgttctaacgattaattttgctctagaaagtcggcactacttcaataaaaactcttattattttgtgattgcggatgtgggcagagatttatttattaattctatgggggataaaatggtgcgttttattggtaataacaccctaagctatagagatggcggcagatacaacacttttgctagcattatcacaggcggggagataaggttattcaaaaccttttatgtgaatgcgggcattggggctaggtttgggcttgattataaagatattaatatcaccggaaatattggtatgcgctatgctttt

SEQ ID NO: 85 - DNA, 579 bp, Artificial Sequence
  Description of Artificial Sequence:  Synthetic Primer
atgaatacttataaaaacagcttgaatcactttttaaatttagtggattgtttagaaaaaatccccaatgtgggtaaaaagtccgcctttaaaatggcgtatcatttgggtttagaaaacccctatctggcgctaaaaatcacgcacgctttagagaacgccctagaaaaccttaaaacatgttcatcttgtaacgcgctcagcgagagtgaggtttgtgagatttgctctgatgaaagccgacaaaattctcagctttgcatggttttacacccaagagatgtgtttattttagaagatttaaaggattttttagggcgctattatgtgttaaactccatagaagaagtggattttaacgccctagaaaaacgcctgattgaagaaaacattaaagaaatcatttttgctttccctcccactttagctaatgattctctaatgctttatattgaagacaaattacagcatttccacctcactttcactaaaatcgctcaaggcgtgcctactggagtgaattttgaaaacattgactcagtttcgctctcaagggcgtttaattcaaggatcaaagca

SEQ ID NO: 86 - DNA, 564 bp, Artificial Sequence
  Description of Artificial Sequence:  Synthetic Primer
ttgtttaaaagaatggttttaatcgctcttttaggggtgttttcaagcgtttcattaagcgctaagagtcttttaagagatgatgggattttagtctctgatttaaagggcatgaaatcagaactatctgatgctcctgcttgggtttttgaagacgctaaagccccctacgaagaaatgggcgtggcgtatatccctgttaataataaatatttagggattgagcaagcgaccttaaacgctaaattgagtctgatcgtggtttttcatgaaatcatgatgaagtataaaaaacgcttcatggagcaattccatgagtccgagcagacgactacgaatatcagttacgctatctataattatctagcgactaagatccaggtatccaacacctacacgaatttaaaatcggaggtggcggtggtgaaaatcaagctagtgggttgtcagattgagcaaatcaaaaggtatttaaaagcgagcgttgaaaaccttaacgataatgaaatcgcttacatcgctaaggtcgctcaaaaagaatttggtagcgtttgtgcgttaagg

SEQ ID NO: 87 - DNA, 1059 bp, Artificial Sequence
  Description of Artificial Sequence:  Synthetic Primer
ttgaaacatttaaccccactcactcacaccatctttaaagccttatggctaggcacagccttaagtgcatctttaagtttagccgcaacagaaagccccactaaaacagagcctaagcccgctaaaggggttaaaaacaagcccaaatcgcccgttactaaagtcatgatgaccaattgcgacaatattaaagattttaacgctaagcaaaaagaagtcttaaaagccgcttatcaattcggctctaaagaaaatttaggctatgaaatggcaggcattgcatggaaagagtcatgcgcaggggtttataaaatcaatttttcggatccgagcgcgggcgtgtatcattcttatatcccaagcgttctaaaaagctatgggcataatgatagcccctttttgcgtaatgtgatgggggaattgctcattaaagacgatgcgtttgcttctgaagtggctttaaaagagttgctctattggaaaacacgctaccatgacaatttaaaagacatgattaaatcttacaacaagggcagtcgttgggaaaggagcgaaaaatctaacgctgatgctgaaaaatattacgaagagatacaagacagaatcaggcgtttgaaagaatctaaaatctttgattcgcagtctagtaatgaccaagaattgcaaaaaagcgctaatagcaacctggatttagaccctatcggcaacgccatgccccaagccttaattgccaaagaaactaaaatagaagaaacccaagcagaaaaatcccaagaaatgaaagagacaactagcgagcaaacaaaaagtaagccagaaaaagcaaaagataaacccatgtatttggcgcaaatcaacagcactgatttcacacccgttaaaaaaagccccaaaaaaccggctaaagtgagccaaaaacactcctttaagaataacattaaaaataatgtaaaaaacaacgccaaaaccgcttccaaaaaacaagaaatgtgcaaaaattgctctccagggcaaaggaatgcgattttagctaaccacatcactctcatgcaagagctt

SEQ ID NO: 88 - DNA, 1461 bp, Artificial Sequence
  Description of Artificial Sequence:  Synthetic Primer
atgattgaatggatgcaaaatcatagaaaatatttagtggttacaatatggataagcacgatcgcttttattgccgctgggatgataggctgggggcaatacagcttttctttagatagcgatagcgctgccaaagtgggacagattaagatttctcaagaagaattagcccaagaataccgccgccttaaagacgcatatgctgagtctatccctgattttaaagaactcaccaaagatcaaatcaaagccatgcatttagaaaaaagcgctttagattcgctcatcaatcaagccttattgagaaatctcgctttagatttagggcttggcgctacaaagcaagaagtggcgaaagagatcagaaaaacgagcgttttccaaaaagatggcgtttttgatgaagaattgtataaaaatatcttaaagcaaagccattaccgccccaaacattttgaagaaagcgttgaaaggcttttaatccttcaaaaaatcagcactctattccccaaaaccactacccctttggagcaatccagcctatcgctttgggcaaaattgcaagacaaattagacattcttatcctaaaccctagtgatgttaaaatctctcttaatgaagaagagatgaaaaaatattacgagtcccataaaaaggattttaaaaagcccacgagctttaaaacacgctctttatattttgacgctagtttggaaaaacctgatttgaaggagttggaggaatactaccataaaaacaaggtgtcttatttggacaaagaggggaaattgcaggattttaaaagcgttcaagagcaagtcaagcatgatttaagcatgcaaaaagcgaatgaaaaagccttaaggagctatatcgctctaaaaaaagcgaacgcgcaaaactacaccacacaagattttgaagagaacaactccccctatactgctgaaatcacgcaaaaactcaccgctctcaaaccccttgaaatcctaaagccagagccttttaaagatggttttattgtggtgcaactcatctctcaaattaaagacgaattgcaaaattttaatgaagctaaaagcgctcttaaaacccgcctaactcaagaaaaaacccttatggcgttgcaaactttagccaaagaaaagcttaaggattttaagggcaaaagcgtgggctatgtaagccctaattttggaggcactattagtgagcttaaccaagaagaaagtgctaagtttatcaacgctctttttaaccgccaggaaaaaaaggggtttatcgctattaataataaagtggtgctctatcaaatcacagaacaaaatttcaaccactcatttagtgcagaagaaagccagtatatgcagcgtttagtcaataacactaaaacggatttttttgataaagcgttgatagaagaattgaaaaaacgctataagatagtcaaatacattcaa

SEQ ID NO: 89 - DNA, 1329 bp, Artificial Sequence
  Description of Artificial Sequence:  Synthetic Primer
gtgtcccctctaaagacgatacggatctattcttaccacgattctattaaggactctattaaggcggtggtgaatatctccactgaaaagaagattaaaaacaattttataggtggcggtgtgtttaatgacccctttttccaacaattttttggggatttgggtggcatgattcctaaagaaagaatggaaagggctttaggcagcggcgtaatcatttctaaagacggctatattgtaactaataaccatgtgattgatggcgcggataagattaaagttaccattccagggagcaataaagaatattccgccactctagtaggcaccgattctgaaagcgatttagcggtgattcgcatcactaaagacaatctgcccacgatcaaattctctgattctaatgatatttcagtgggcgatttggtttttgcgattggtaacccttttggcgtgggcgaaagcgttacgcaaggcattgtttcagcgctcaataaaagcgggattgggatcaacagctatgagaatttcattcaaacagacgcttccatcaatcctggaaattccggcggcgctttaattgatagccgtggagggttagtggggattaataccgctattatctctaaaactgggggcaaccacggcattggctttgccatcccttctaacatggttaaagatactgtaacccaactcatcaaaaccggtaagattgaaagaggttacttgggcgtgggcttgcaagatttgagtggcgatttgcaaaattcttatgacaacaaagaaggggcggtagtcattagcgtagaaaaagactctccggctaaaaaagcagggattttggtgtgggatttgatcaccgaagtcaatgggaaaaaggttaaaaacacgaatgagttaagaaatctaatcggctccatgctacccaatcaaagagtaaccttaaaagtcattagagacaaaaaagaacgcgctttcaccctcactctagctgaaaggaaaaaccctaacaaaaaagaaaccatttctgctcaaaacggcgcgcaaggccaattgaacgggcttcaagtagaagatttaactcaagaaaccaaaaggtctatgcgtttgagcgatgatgttcaaggggttttagtctctcaagtgaatgaaaattccccagcagagcaagccggatttaggcaaggtaacattatcacaaaaattgaagaggttgaagttaaaagcgttgcggattttaaccatgctttagaaaagtataaaggcaaacccaaacgattcttagttttagacttgaatcaaggttataggatcattttggtgaaa

SEQ ID NO: 90 - DNA, 864 bp, Artificial Sequence
  Description of Artificial Sequence:  Synthetic Primer
atgagtaagagtttataccaaactttaaatgtgagcgaaaacgccagccaagatgaaatcaaaaaatcctaccgccgtttagcccgacaataccacccggatttgaataaaaccaaagaagccgaagagaaattcaaagaaatcaacgccgcttatgaaattttgagcgatgaagaaaaacgccgccaatacgatcagtttggcgataacatgtttggcgggcagaatttcagcgattttgccagaagccgtggtcctagtgaagatttagacgatattttaagctctatttttgggaaaggaggcttttcgcaaagattttctcaaaactcgcaaggcttttctggctttaatttttccaatttcgcccctgaaaatttagacataaccgccgctttaaatgtctctgttttagacacccttttaggcaataaaaaacaagtgagcatcaataatgagacttttagccttaaaatccctattggcgtggaagagggcgaaaagattagggttcgcaacaaggggaaaacggggcgaacgactaggggcgatttgctcttagagatccatattgaagaagatgaaatgtataggcgcgagaaagatgatattacccaaatctttgatttacccttaaaaacggctctttttggagggaaaattgaaatcgctacttggcataaaaccttaaccctaaccattccccctaacaccaaagcgatgcaaaaattccgcattaaagaaaaagggatcaaaaacagaaaaacttcgcatgtgggggatttgtatttgcaggctcgtttgattttgcctaaaactgaaacgctttctaatgagttgaaagcgttattagaaaaagaattg

SEQ ID NO: 91 - DNA, 885 bp, Artificial Sequence
  Description of Artificial Sequence:  Synthetic Primer
atgaaacaaacaaccattaaccactctgtggaattagtagggataggcttgcacaagggcgttcctgtgaagcttgttttagagcctttaggggaaaatcaaggcattgttttttaccgctctgatttgggcgtgaatctccccttaaaacctgaaaacatcgtggataccaaaatggcaaccgtgttgggtaaggataatgctaggatttctacgattgagcatttgctttcagctgtccatgcgtatggcattgacaatcttaagatctctgtggataacgaagaaatccctatcatggatgggagtgctttgacttattgcatgcttttagatgaagcagggattaaagaactagacgctcctaaaaaggtgatggaaatcaagcaagccgttgagattagagagagcgataagtttgttaaaattgagccagacagccagctttctttgaatttcacgattgattttaaccatccggttatcgctaagcaagcccatcattttgtctttagtaaaaccgcttacaaagagcaagtcgctaaagctcgcacctttgggtttttgcaagaagtgaattacttgcgatccattggtttggcgaaaggagggagtttgaataattgcatcgtgctggatgaaaacagcattttgaataaagagggcttgaggtgcgaaaaggagtttgtgtgccataagattttagacgctatgggggatctaatggttttaggcatgcctgtgatgggcaaatacacttctttttcagggagtcataagctcaattccatgttggttaaagccattttggcggacgctaaaaattacgaagttttgatcgctgcagatccggctaaagaatttgcgttgcaaaaggctttcgct

SEQ ID NO: 92 - DNA, 2574 bp, Artificial Sequence
  Description of Artificial Sequence:  Synthetic Primer
gtgcaaccgatgaaatctaaaaaactttatttggctttaatcataggggttttattagcgtttttaaccctatcttcatggctgggtaatagcggtttagtggggcgttttggggtgtggtttgccgcactcaataaaaaatattttgggcatctttcattcattaatttaccctatttagcatgggttttattccttttatacaagactaaaaacccttttacagaaatcgttttagaaaaaactttagggcatctattaggcattttatctttgctctttttacaatctagcctattaaatcaaggggaaatcggcaacagcgcgcgtttgtttttacgcccttttataggggattttgggctttatgcgctgataacgcttatggtagttatttcttatttgattctattcaaactaccccctaaaagcgttttttatccttatatgaacaaaacacaaaaccttttaaaagagatttacaaacaatgcttacaagcctttagccctaattttagcccaaaaaaagagggttttgaaaacaccccatcagatattcaaaaaaaagaaaccaaaaacgacaaagaaaaagaaaaccgcaaagaaaaccctattaatgaaaaccacaaaacccctaacgaagaaccgtttttagcgatccctaccccctataacacgactttaaatgattcagagccgcaagaaggcttagtccaaatttcctcccacccccctacccattacaccatttaccctaaaagaaaccgatttgatgatttgactaaccccactaacccccctttaaaagaaattaaacaagaaactaaagaaagagaacccacgcctacaaaagaaactcttacgcccaccacgcccaaacctatcatgcccacacttgcacccataatagaaaatgacaacaaaacagaaaaccaaaaaacccccaaccaccctaaaaaagaagaaaacccacaagaaaacacgcaagaagaaatgatagaaggaaggatagaagaaatgataaaggaaaatctaaaaaaagaagaaaaagaagtgcaaaacgctccaaactttagcccagtaacccccacaagcgctaaaaaacccgttatggttaaagaattgagcgaaaataaagagatattagacggattggattatggcgaagtgcaaaaacccaaagattatgagcttcccaccacgcaattattgaatgcggtttgtttgaaagacacttctttagacgaaaacgagattgaccaaaaaatccaggatctattgagcaaactgcgcacctttaaaattgatggcgatattatccgcacttattcaggccctattgtaaccacttttgaattccgcccagcccctaacgttaaggtgagtcgtattttaggcttgagcgatgatttagcgatgactttatgcgctgaatccatccgcattcaagcccctattaagggtaaagatgtcgttggcattgaaatccctaacagccaaagccaaattatttatttaagagaaattctagagagcgaattgtttcaaaaatccagctcgcccttaactctagctttaggcaaagacattgtgggtaaccctttcatcacggatttaaaaaagctcccccatttgctcatcgctggcacgacaggaagcggtaagagcgtgggcgtgaatgcgatgattttatccttactttataaaaaccctcccgatcaactcaaattagtgatgatcgatcccaaaatggtagaatttagtatttatgcggatatccctcatttgctcacgcccattatcaccgaccctaaaaaagctattggggctttgcaaagcgtggctaaagaaatggaacgccggtattctttaatgagcgaatacaaggttaaaaccattgattcttataatgaacaagccccaagtaacggcgttgaagcgttcccctatttgattgtggtgattgatgaattagcggatttaatgatgacagggggcaaagaagcggagtttcctatcgctagaatcgctcaaatggggcgcgcgagcggcttacacctcattgtagcgacccaacgcccaagcgtggatgtcgtaaccggcttgattaaaaccaacttgccttcaagggtgagttttagggtaggcactaagattgattctaaagtgattttagacactgatggggcgcaaagcttgttaggaagaggcgatatgctctttacccccccaggagcgaacgggttagtgcgcttgcatgccccctttgccactgaagatgaaatcaaaaaaatcgtggattttattaaagcccaaaaagaagtacaatacgataaagatttcttgctagaagaatcacgcatgcctttagacacccctaattatcaaggcgatgacattttagaaagggctaaagcggtgattttagaaaaaaagatcacttctacgagttttttacaacgccaattaaaaatcggctacaaccaagccgctaccattactgacgaattagaagctcaaggctttttatccccaagaaacgctaaaggcaacagagagattttgcaaaacttt

SEQ ID NO: 93 - DNA, 870 bp, Artificial Sequence
  Description of Artificial Sequence:  Synthetic Primer
atgttagaaaatgtcaaaaagtccttttttagggttttgtgcttgggtgcgttgtgtttaggggggctaatggcagagcaagaccctaaagagcttgtgggtttgggggcaaagagctacaaagagaaagatttcactcaagcgaagaaatattttgagaaagcgtgcgatttgaaagaaaatagcgggtgttttaatttaggggtgctttattatcaagggcaaggggtggaaaagaacttgaaaaaagccgcctccttttacgctaaagcttgcgatttgaattacagcaatgggtgtcatttgctagggaatttatattacagcgggcaaggcgtgtcccaaaacaccaataaagccctacaatactactctaaagcgtgcgatttgaaatacgctgaagggtgcgcgagcttaggggggatttatcatgatggtaaagtggtaactagggattttaaaaaagcggtggaatatttcactaaagcgtgcgatttaaacgatggcgatggttgcacgatattagggagcttgtatgatgcaggcagaggtacgcctaaagatttgaaaaaggcgctcgcttcgtatgataaagcttgcgacttaaaagacagcccagggtgctttaacgcagggaatatgtatcatcatggcgaaggtgcaacgaagaattttaaagaggctctcgctcgttattctaaagcatgcgaattggaaaatggcggagggtgtttcaatttaggggctatgcaatacaatggcgaaggcgtaacaaggaatgaaaagcaagccatagaaaactttaaaaaaggctgtaaattgggcgctaaaggggcgtgcgatattctcaagcagcttaagatcaaagtt

SEQ ID NO: 94 - DNA, 2871 bp, Artificial Sequence
  Description of Artificial Sequence:  Synthetic Primer
gtgaagttacccaaagccttaaacgaagccaccgcaggagcggccttaaaatatcacattaaaagagcgcttgagagaagccactcaataagcgattttagtaagaatttagaactaagcacacaaaaatcccactttagcaacaacacgcttaaaatcattgaagagcttaacaacggcgtcaaacaagcgagcgaagaaatcaaagaaaaagcgcgcgatttttctaatcaaaaactcactaacgagcaaatcaaagatctattaaataacgcagaaatccctacaagcgggagagacgctatcacttttggagtgaataacctaaaccctgagattgttgaattcctgcacaaaaacaacaagaaaatgattatagaaaaagcctctaacaaagaattagaacttttaaaagacgctaactttaaacaccctgaaaacataagggcgagtttagatcatgatgctatcgctcacatactcaaaaggcatggcgttaattctgttaatgttagaaatggtgagatccctattacgaacgaagatattgctaattatagatatatcgttaataacgctgatgcaattcttaggactttagacaacgagaataaagaacttataagcgcgtttaaacaaatcaacggctatgcggtagtcgtggagcaagcgatcaataagaaaaatgaattagttttgaaaacgatgtataagagtaaaggagattataaggataataacgcttataagaagttttcaagcacccatacactcaatgctgatgcaaaggtgaaccataggttgagttcctatagcggtgctacagagaatactactcaaaaagatttaatagatcaagagaatttattaaaaacaagcgaaaatttaaacgaaagcacaccaaaacctaccaacttaagcccgctagaacaagccaacgctgaaaagttagcgaagttagaaagcgagaagctagaaagcgaaaaagagtttttgaaagctaaagagcaagaagccacacgcaaagccgcattaaaaaagaaattagaacacgagcgaggcaatgcgggcaacattgaaagccagactaaaatagaagtaggagaggatatacccacacaaacacaagcgcaattacccaaaagccgagtgaggctaaacgaacgagagatttacgatctagactatgcgatcgtcaaagcgaaagatttaaaaccaagctttaccacaggcgggacgcaaaagagaacggacatgaacgaagagcagattaaaagcattgctgaaaattttgatcctaaaaagatatttggtagcggagggtttgaagatttaccgatcattctacatgacgggcaagtgatcgcaggaaaccacagaatccaaggcatgctaaacttcacgcctaaaagccgtttttcttacgagagagcgatcaaggaatactatcacatagacttaaaaccggacgagttgttagtgagagtgccacacaagcgcctaaacaacaccgagatcaacaatttagcggcttcatccaatcaaggacgcttcaatagcgaaagcgatcacgctatagcggttttaagccactatgaagccaagttaaaagaattagaccaaaaattagacgctgatagcatctactcattaaaaaacattgttgctaaaaatttgaattttgataaggctacgcatcctaatgtaaccgatagtaatttagcgttgctgatgtttaacatgccacgaaccaaaacgcaagggatagaattactcaaccgctggaaaaaagaattttccaacgacattaaaagctatgaaaaagtaaaaaaaatgtttgtagataacgcgggcagttttcacaatctcatccacgatctgaacttccctaaggtgagtttaaacgcttatttaagcgatattatggatcgcagttttgcgaatttaaagaattaccaaagcacgagcgagagcctgaaagatttgagcgaaaaattctataaaacgagttcgttagagatgtttgaaaagagcgatcaaagcacgagcgatattagcgagattttaggaggagcgatcgcacgatttgcacgatttgatgatccgagcaaagcgttatttgaagccttaagaagcgataacattaaaaaaggcttgaaagattacaagatcgcagatgttactaaggacatgtttaacgctgatagtaaagagtttaaggacattgatatttacgatttcacgcattaccttttaatggtaaatagagagccgaatgaaaataaccctatcttaaagcgcttgatagaagccgtgaaagacatgcaaaaagaaagcgagaaaggaataaaacaaaaacttgaaacgcctagcgaatggggacacaattatagcgagtttaaaggtgatggtttaggagcgattaacaagttattagaaactaaaaaaggttttgtagcgggagcgtttcataaggaaggtttaggggatattgatttagtttatggaaactctaaatacggactagaacatatatttaatcgtagggaaagcgatgcgatagacaaaggcatgagtaaagaagaagctaaaaaatacgcattaaaaataattaacaatatccctaacataataagcaatggaaaactatcaaaagataatttagggcgtttaagtattgagtttgaaaatcaaagagtgggtttgaatgatagttggaaaggtgagactttaaataataggtgggttattacaagttatgaaatagataaatcaaggaatgggctaattgagtcgcctttagcaccaaattacaaggggaaagatactaatcccctaaaccttgatagccctaatcctaccacaaaaaat

SEQ ID NO: 95 - DNA, 768 bp, Artificial Sequence
  Description of Artificial Sequence:  Synthetic Primer
atgggatacgcaagcaaattagccttgaagatttgtttggcaagtttatgtttatttagcgctcttggtgcagaacaccttgaacaaaaaaggaactatatttataaaggggaggaagcctataataataaggaatatgagcgggcggcttctttttataagagcgcgattaaaaatggcgagccgcttgcttatgttcttttagggatcatgtatgaaaatggtaggggtgtgcctaaagatgaaaagaaagcggctgaatattttcaaaaagcggttgataacgatatacctagagggtataacaatttaggcgtgatgtataaagagggtagaggtgtgcctaaagatgaaaagaaagccgtggagtattttagaatagctaccgagaagggctatactaacgcctatataaacttaggcatcatgtatatggagggtaggggagttccaagcaactatgtgaaagcgacagagtgctttagaaaagcgatgcataagggtaatgtagaagcttatatccttttaggggatatttattatagtgggaatgatcaattgggtattgagccagacaaagataaggcgattgtctattataaaatggcggctgatatgagctcttctagagcttatgaagggttagcagagtcttatcagtatgggttaggcgtggaaaaagataagaaaaaggctgaagaatacatgcaaaaagcatgcgattttgacattgataaaaattgtaagaaaaagaacacttcaagccga

SEQ ID NO: 96 - DNA, 1818 bp, Artificial Sequence
  Description of Artificial Sequence:  Synthetic Primer
atgggcggaatcttatcttcactcaacacttcttacaccggccttcaagcccatcagagcatggtggatgttaccgggaataatatttctaacgctagcgatgaattttatagccgccagcgcgtgattgcaaagccccaagcggcctatatgtatggcactaaaaacgtgaatatgggcgtggatgtggaagccattgaaagggtgcatgatgagtttgtttttgctcgttacacgaaagctaattacgaaaacacttattacgatacagaattttcgcatttaaaagaagcgagcgcgtattttccggacattgatgaagcgagcctttttacggatttgcaagattattttaattcatggaaagaattgtctaaaaacgccaaagactccgctcaaaaacaggctctcgctcaaaaaacagaagctttaacgcacaacattaaagacaccagagagaggttaacgaccttacagcacaaggcgagtgaagaattaaaaagcgtcattaaagaagtcaatagcttgggttctcaaatcgctgagattaacaaacgcattaaagaagtggaaaacaacaagagtttaaagcatgcgaacgaattaagggataagcgagatgaattggaattccatttgcgagagcttttaggggggaatgtttttaaaagcagcattaagactcattcgctcaccgataaagactcagcggattttgatgagagctataaccttaatatcgggcatgggttcaatatcattgatggctctattttccatcctttagtggttaaagaatccgaaaataaagggggtttgaaccaggtttattttcaaagcgatgattttaaggttactaatattactgacaagctcaatcagggaagagtgggggcgttattgaatgtgtataatgacggctctaacgggactttaaagggcaaattacaagattatattgatttgttggattcttttgctaagggtttgatagaatccactaatgcgatttacgctcaaagcgcgagtcattatattgagggcgagccggtggagtttaatagcgatgaagcctttaaagacactaactacaatatcaaaaacggctcgtttgacttaatcgcttacaacaccgatggtaaagaaatcgctagaaaaaccattgctatcacgcccattacaaccatgaacgatattatccaagccattaacgctaacactgatgacaatcaggacaataacaccgaaaacgattttgatgattatttcacagcgggctttaacaatgagactaaaaagtttgttatccagcctaaaaacgcttcgcaagggttgtttgtctctatgaaagataacggcacgaattttatgggagcgttaaaactcaaccctttttttcaaggcgatgacgcttctaatatcagcttgaataaggaatacaaaaaagagcctaccactatccgcccatggcttgctcccattaatgggaattttgatgtggcgaacatgatgcagcaattgcaatacgatagcgtggatttttataacgataagtttgacattaaaccaatgaaaatcagcgagttttatcaatttttaaccggtaaaatcaacacggacgctgaaaaatccgggcgtattttggacactaaaaagagcatgttagaaaccattaaaaaagagcaactctctatttcgcaagtgagcgtggatgaagaaatggtgaatttgatcaagtttcaaagcggctatgcggctaacgctaaagtcattaccgctattgatcggatgatagacactttattggggattaaacaa

SEQ ID NO: 97 - DNA, 1251 bp, Artificial Sequence
  Description of Artificial Sequence:  Synthetic Primer
atgaggtatttatggctttttttaatacacactatagggctttttgcaacagataaaacactagatattattaaaaccattcaaaaacttcctaagattgaagtgcgctactctatagataacgatgccaattacgctttaaaattgcatgaagtcttggcgaatgatttaaagactagccagcattttgatgtttctcaaaacaaggatcaaggtgctatcaattacgcagaactcaaggataaaaaagtccatctcgtagcgcttgtgagcgtggcggtagaaaacggcaataaaatttcacgattaaaactttatgatgtggatacaggaacgctcaaaaagacttttgactaccctattgtaagtttagatctatacccttttgcagcgcacaacatggctattgtggtgaatgactatttaaaagccccttctatcgcttggatgaagcgccttattgttttttctaaatacattggaccaggaatcacaaatatcgcactagcggattatacgatgcgttatcaaaaagaaatcatcaaaaacaataggctcaatatcttccctaaatgggcgaacgctgagcaaacggagttttattacacgcagtatggcgaaagaacgcccatgattttaaaatacaacattcaaaaagccactcatgagaatatcgctagctctcaaggaatggctgtggtctctagcgtgagttctgatggctctaaaattttaatgtctttagcccctgatggccaaccggatgtgtatttgtatgacacgcataaaaaaactaaaactaaaataacgcgctatccggggatagatgtctcaggagtgtttttagaagatgacaagtctatggcttttgtttcggatagatccggttatcctaacatctacatgaagaaattggggttaaaagagagcgcggagcaactcctttatgaagggagaagcaatgaatccattgacgcttataaagatagtattgtgtatgtgagccgggaaaaccttaatgaatttggcaaaacggtgtttaatttgaatttgatcaccttaaatagcaaatatatccgcaggcttaccgtgaatggctctaaccagatgcctcgtttttctacggatgggagaaatatcatgtatatcaaaaagacaccccaagaatacgccatggggcttattttgctagattataatcagagttttttattccctttaaagaatgtgaaaatacaagcctttgattgg

SEQ ID NO: 98 - DNA, 1344 bp, Artificial Sequence
  Description of Artificial Sequence:  Synthetic Primer
atgtttcaagcgttaagcgatgggtttaaaaacgcgctcaataaaatccgctttcaagatgatgaaaaagcgctagacagagcgttagatgaattgaaaaaaacgctcttaaaaaacgatgtgcatcataaagtggctagagaattgctcaaaaaagtggaaagtcaaactaaacttaatggcattggtaagcagcaatttttagacgctttagaaaagagtttgttagaaattttaagcgctaaagggagcagtggtttcactttcgctcaaacgcccccaactgtggttttaatggccggtttgcaagggagcggtaagacaaccaccaccgctaaactcgctcattatttaaaaaccaaaaataaaaaagtgcttttatgcgcatgcgatttgcaacgcctagcggcagtggagcaattaaaggttttgggcgaacaggtgggcgtggaagttttttatgaagaaaataaaagcgtgaaagaaatcgctagcaacgctttaaaaagggctaaagaagcgcaatttgatgttttgctcgtggatagcgcggggcgtttagccattgataaagagcttatgcaagaattaaaagaagttaaagaaatcttaaacccccatgaagtgctgtatgtcgcagacgcattgagcgggcaagatggcgtcaaaagcgcgaacacctttaatgaagaaataggcgtgagtggggtggtgttaagcaaatttgatagcgattctaaagggggtatcgccttaggcatcacttaccaattaggcttacccttgcgttttattgggagcggggaaaaaatccctgatttagacgtgtttgtgcctgaaagaattgtggggcgtttgatgggggctggagatattgtctcgctcgctgaaaaaaccgctagcgttttaaaccctaatgaagccaaagatttaagcaaaaaactcaaaaaagggcaattcactttcaatgactttttaaaccagattgaaaaagtgaaaaaattaggctctatgagttctctaatctctatgattccaggtttagggaatatggcaagcgcgttaaaagacacggatttagaaagctctttagaagtgaaaaaaatcaaggctatggtcaattccatgaccaaaaaagagcaagaaaaccccgagattttaaacggcagccgaagaaaaaggatcgctttagggagcggtttagaagtgtctgaaatcaatcgcatcatcaaacgctttgatcaagcgagcaaaatggcgaaacgcttaaccaataaaaagggtattagcgatttgatgaatctaatgagtcaggctaaaaatcaaacgccccctaaaatgcgc

SEQ ID NO: 99 - DNA, 2622 bp, Artificial Sequence
  Description of Artificial Sequence:  Synthetic Primer
atgataatgaaacaagaacccaccacctaccaaccagaagagatagaaaaaaagatttatgaaatttgctctcatagggggtattttgaaattgatggcaatgaagcgatccaagaaaaaaacaaacgattttgcttgatgatgccccctcctaatgtgaccggtgtgttgcacatagggcatgccctgactttaagcttgcaagatattttagcgcgttacaaacgcatggatgggtataagactttgtatcagcccgggttggatcacgctggcattgcaacgcaaaatgtcgtggaaaagcagcttttaagtcaagggattaaaaaagaagatttagggcgtgaagagttcattaaaaaagtgtgggaatggaaagaaaagagcgggggagcgattttagagcaaatgaagcgtttaggcgtgagcgcggccttttctaggactcgtttcacgatggataagggcttgcaaagagcggtcaaattggcgtttttgaaatggtatgaaaaaggtctcattattcaagataattacatggtgaattggtgcactaaagatggggcgttgagcgatattgaagtggagtatgaagagcgtaagggggcgttgtattatattagatattatttagaaaatcaaaaagattatttagtggtggctaccacacgccctgaaaccttgtttggcgatagcgcgcttatggtcaatcctaacgatgagagatacaagcatttggtggggcaaaaagcgatcttgcctttaatccatcgcacaatccctattatcgctgatgaacatgttgaaatggagtttggcacagggtgtgtgaaagtaacccctgggcatgattttaacgattatgaagtgggcaaacgccaccatttggaaacgattaaaatctttgatgaaaaggggattttaaacgcgcattgcggggagtttgaaaatttagaacgattagaagctagagataaggtcgtagaaagattaaaagaaaacgccctattggaaaaaatagaagaacacacgcatcaagtggggcattgctatcgttgtcataatgtggtagaaccttatgtgtctaagcaatggtttgtcaagcctgaaatcgctcaaagttctattgaaaaaatccaacaaggtttggcgcgattctacccttctaattggatcaataattacaacgcttggatgagggaattacgcccttggtgtatcagcaggcaattgttttgggggcatcaaataccggtattcacttgcgagaataaccaccagttcgtaagcttagacacccccttaagttgccctacttgtaagagcgaaacactagagcaagataaggatgtgctagacacatggtttagttcagggctatgggcgttttccactctagggtgggggcaagaaaaaagcggtttgtttaatgaaagcgatttgaaagatttctaccctaacacaacgctcattactgggtttgacatcctctttttttgggtggctaggatgcttttttgcagcgaatcgcttttaggcgaattgccctttaaagatatttacttgcacgccttagtgagagatgaaaagggtgaaaaaatgagcaaatctaagggtaatgtgatcgatcctttagagatgatagaaaaatacggcgcggatagcttgcgtttcactttagccaatttgtgcgctacgggtagggacattaagctttccactacgcatttagaaaataacaagaatttcgccaacaagctttttaatgcggcgagttacttgaagctcaaacaagaatctttcaaagataaagagcgtttgaatgaataccaaacgcctttggggcgttatgcgaaatcgcgcttgaattcagcgactaaagaggcgcgtaacgctttagataattatcgttttaatgacgccacgactttgttataccgctttttgtggggggaattttgcgactggttcattgaattttctaaagtggaaaatgaagcgatagacgaattagggagcgtgttaaaagaggctttaaaactcttgcaccctttcatgccctttatcagcgagtctttataccacaagctcagcaatacggaactagaaaacactgaatctatcatggtcatgccttaccctaaagatttggcgcaagatgaaaaattagagcatgaatttgaagtgattaaagattgcattgtgtctttaaggcgtttaaaaatcatgctagaaaccccaccgattgttctaaaagaagcgagcgtgggattaagagaagccatagaaaacacagagcgtttgcaaacttacgcccaaaaattagcgaggttggaaaaagtcagcgtgattagttctaagcctttaaaaagcgtgagcgatgtgggggaattttgccagacttatgcgaatttagaaaatcttgatttaagcccgcttgttgcgcgtttgaaaaagcagttggaaaaattggaaaaagaaaaattaaaactcaatttgcacaatgaaaattttgtcaaaaacgcgcctaaaagcgtgctagaaaaagctaaagagagtttaaaaacgcttttagaaaaagaaagtaaaattaagcaagaattggacttgttagaacaacca

SEQ ID NO: 100 - DNA, 606 bp, Artificial Sequence
  Description of Artificial Sequence:  Synthetic Primer
atgaaaaaaacttttttgatcgctttagcgcttacggcttctcttgtaggcgctgaaaataccaaatgggattataagaataaagaaaatggcccacaccgctgggacaaattgcacaaagattttgaagtgtgcaaaagcggtaaaagccaatcgcccatcaacattgagcattactaccacacgcaagataaagccgatttgcaattcaaatacgccgcttctaaacctaaagcggtctttttcacccaccacactttaaaggcttcgtttgagccgactaaccacatcaattatagagggcatgactatgtgttggataatgtgcatttccacgcccctatggagtttttaatcaataataaaaccaggcctttgagcgcgcatttcgtgcataaagacgctaaagggcgtttgctagtgttagcgattggttttgaagaagggaaagaaaaccccaaccttgatcctattttagaaggcattcaaaagaaacaaaattttaaagaggtggctttagacgctttcttgcctaaaagcatcaattactaccatttaacggctctctcaccgctcctccttgcacagagggggtggcatggtttg

SEQ ID NO: 101 - DNA, 8670 bp, Artificial Sequence
  Description of Artificial Sequence:  Synthetic Primer
atgtcaaaaaaaattcccctaaaaaaccgcttgagagctgattttacaaaaaccccaacagatttagaagtccctaatttattattattacaacgagacagctatgattctttcttgtattctaaagagggtaaagagagcgggattgaaaaggtttttaaatccattttccctatccaagatgagcataaccgcatcactttagaatacgcgggttgcgaatttggcaagtctaaatacaccgttagagaagcgatggagaggggcattacctactctatccctctcaaaattaaggtgcgcttgatcttgtgggaaaaagataccaagagtggcgaaaagaacggcattaaggatattaaagaacaaagcattttcattcgtgagatccctttgatgacagaacgcacttcatttattattaatggggtggagcgcgtggtggtcaatcaactccacagaagccccggtgtgattttcaaagaagaagagtctagcacttctttaaacaagctcatttacacagggcaaatcattcctgataggggttcgtggttgtattttgaatacgattctaaagatgttttatacgctcgtatcaataaacgccgtaaagtgcctgttaccattttattcagggcgatggattatcaaaaacaagacatcatcaaaatgttctacccgcttgttaaagtgcgttatgaaaacgataaatatttgatcccgtttgcttcattagacgccaatcaaagaatggaatttgacttgaaagatcctcaaggcaaggttattcttttagcgggtaaaaagctcacttcaagaaagattaaagagcttaaagaaaaccatttagaatgggtggaataccctatggatattttactcaatcgccatttagctgagcctgttatggtagggaaagaagtcttattggacatgctcactcagctagataaaaacaaattagaaaaaatccacgatttaggcgtgcaagaatttgtgatcatcaacgatctggcgttagggcatgacgcttccattatccaatctttttcagccgattctgagtctttgaaattactcaagcaaaccgaaaaaattgatgatgaaaacgctctagcggcgattcgtatccataaggttatgaaaccaggcgatcccgttacgactgaagtggctaagcagtttgtcaaaaaacttttctttgatccagaacgctatgatttgaccatggtgggccgcatgaaaatgaatcacaagttaggcttgcatgtgcctgattacattacgactttaacgcatgaagatattatcaccaccgttaaatacctcatgaagatcaaaaacaatcaaggcaagattgatgacagggaccacttgggcaatcgtaggattagggcggtaggggaattgttggccaatgaattgcattcaggtttagtgaaaatgcaaaagaccattaaagacaagctcactaccatgagcggggcttttgattcgctcatgccccatgacttggtcaattctaaaatgatcacaagcaccatcatggaatttttcatgggcggtcagctctcgcaatttatggatcaaacgaatcccttgagtgaggttacgcacaagcgccgcctttcagcgctcggcgaaggggggttggtgaaagacagagtggggtttgaagccagggatgtgcaccccacgcattatggccgaatttgtcccattgagaccccagaaggtcaaaatatcggtctgatcaacaccctttccactttcacaagagtgaatgatttaggctttattgaagccccttataaaaaggttgtggatggcaaggtcgtgggtgagacgatttatttgaccgctattcaagaagacagccacatcatcgctcccgcaagcacccccattgatgaagaggggaatattttgggcgatttgattgaaacgcgcgtggaaggcgagatcgttttaaacgaaaaaagcaaagtaaccttaatggatttaagctctagcatgctagtgggggtagccgcatcgctcattcctttcttagagcatgatgacgccaaccgtgccttaatggggactaacatgcagcgccaagcggtgcccttattaagaagcgacgctcccattgtaggcacggggattgaaaaaattattgctagggattcttggggagcgatcaaagccaatcgcgcaggcgttgtagaaaaaattgattctaaaaatatttatattttaggcgaaagcaaagaagaagcctatattgatgcgtattctttgcaaaaaaacttgcgcaccaaccaaaacaccagtttcaatcaagtccctatcgttaaagtgggcgataaagtgggagccgggcaaatcatcgctgatggccctagcatggatagaggcgagttggcgttagggaaaaatgtgcgcgtggcgttcatgccttggaatggctataactttgaagacgcgatcgtggtgagtgagtgcatcactaaagatgatattttcacttccacccacatttatgaaaaagaagtggatgctagggagcttaagcatggtgtggaagaatttaccgctgatattcctgatgtgaaagaagaagcgctcgctcatcttgatgaaagcgggatcgttaaagtcggtacttatgtgagcgctggcatgattttggtgggcaaaacttctcctaaaggcgagattaaaagcacgcctgaagagcggcttttaagggctatttttggggataaagccgggcatgtggtcaataagagtttgtattgccctcccagtttggaaggcacggtgattgatgtgaaagtcttcactaaaaaaggctatgagaaagacgcgcgagttttgagcgcgtatgaagaagaaaaagccaagcttgatatggagcattttgatcgcttgaccatgctcaatagagaagaattgttgcgcgttagctcgctcctttctcaagcgattttagaagagcctttcagccataacggcaaggattataaagaaggcgatcaaatccctaaagaagaaatcgcttcaatcaaccgcttcactttggctagtttggtcaaaaagtattctaaagaagtgcaaaaccactatgaaatcactaaaaacaatttcttagagcaaaagaaagttttgggcgaagagcatgaagaaaagctttctattttagaaaaagatgatattttgcctaatggcgtgatcaaaaaagtcaagctctatatcgctacaaaacgaaagcttaaagtgggcgataaaatggcaggaaggcatgggaataaagggattgtgtctaatatcgtgccggttgcggatatgccttataccgctgatggcgagcctgtagatattgttttaaaccctttaggcgtgccaagccgcatgaatatcgggcagattttagaaatgcatttaggcttagtggggaaagaatttgggaagcaaatcgctcgcatgctagaggataaaaccaaagattttgccaaagaattgcgtgctaaaatgctagaaatcgctaacgctattaatgaaaaagaccccttgacaatccatgcgcttgagaattgttctgatgaagagcttttggaatacgcaaaagattggagcaagggcgttaagatggctatccctgtgtttgaaggcatctcgcaagaaaaattttataagctatttgaattagctaagatcgctatggatggcaaaatggatctgtatgacggacgcacaggcgagaaaatgagggagcgcgtgaatgtgggctacatgtatatgatcaaactccaccatttagtggatgaaaaagtccatgccagaagcacaggcccttatagcttagtaacgcaccagcccgtggggggtaaagcgctctttgggggtcaaaggtttggggaaatggaagtgtgggccttggaagcttatggcgcagcgcacactctaaaagaaatgctcaccattaaatccgatgatattagaggcagagagaacgcttatagggctatcgctaaaggtgagcaagtgggcgagagtgaaatccctgagactttctatgttttgactaaagaattgcaatcgctcgctttggatattaatatttttggggacgatgtggatgaggatggagcacctaaacccattgtcattaaagaagatgacaggcctaaagactttagctctttccagctcacactagctagccctgaaaaaatccattcttggagttatggggaagttaaaaagccagaaacgatcaattatcgcaccctaaaacctgaacgagacggcttgttttgcatgaaaatctttggccccactaaagattatgaatgcttgtgcggcaaatacaaaaagcctcgcttcaaagacattggcacatgcgaaaaatgcggcgtggcgatcacgcactccaaagtcaggcgttttagaatggggcatattgaattggccactcctgtagcgcatatctggtatgttaattccttgcctagccgtatcggcacgcttttaggcgttaagatgaaagacttagagcgcgtgttgtattatgaagcttatatcgttaaagaaccaggcgaagccgcttatgacaatgaaggcactaagcttgtgatgaaatacgatattttgaatgaagagcagtatcaaaatatctcacgaagatacgaagacaggggctttgtagcgcaaatgggcggtgaagcgatcaaggatttgttagaagaaattgatttgatcaccttattgcagagtttgaaagaagaagtgaaagacaccaattctgatgcgaaaaagaaaaaactcattaagcgtttgaaagtggtagaaagctttttaaattctggtaataggcctgaatggatgatgctcacggttttaccggtattgccaccggatttaaggcctttagtcgcgctagatggcgggaagtttgcagtcagcgatgtgaatgaattgtatcgtcgtgtcatcaatcgtaaccaacgcttgaaacgcttaatggagcttggagcgccagaaatcattgtgcgcaatgaaaaaaggatgttgcaagaagccgtggatgtgctttttgataacggccgcagcactaatgcggttaaaggggctaacaaacgccctttaaaatcgctcagtgaaatcattaaaggcaagcaggggcgtttcaggcaaaaccttttaggtaagcgcgtggatttttcaggcagaagcgtgattgtggttgggcctaatctcaaaatggatgaatgcgggttgcctaaaaacatggcgttagaactcttcaaaccgcatttgttatccaagcttgaagagagaggctatgccaccacgctcaaacaggctaaacgcatgattgagcaaaaaagcaatgaagtatgggagtgcttgcaagaaatcacagaggggtatccggtgctactcaaccgcgctcctaccttgcacaagcaatccattcaagcgttccatccaaagctgattgacggcaaagcgatccaattgcacccgttagtgtgttcagcgttcaacgccgattttgacggggaccaaatggcggtgcatgtgcctttaagccaggaagcgatcgctgaatgcaaggtgctgatgctaagctctatgaatatccttttgcctgctagcggtaaggccgtagccattcctagccaagatatggttttagggctttattatctttctttagaaaagagcggggtcaagggcgagcataagcttttttctagcgtgaatgaaatcatcaccgccattgacacgaaagaattagacatccacgcaaagattagggttttagatcaagggaatattatcgctacgagtgcagggcgcatgatcattaagtccattttgcctgattttatccctacggatttgtggaacagacccatgaagaaaaaagatattggcgtgcttgtggattatgtgcataaagttggcggtatcggtattactgcaacctttttggataatttaaaaacgcttggctttaggtatgcgactaaggctggtatttctatctctatggaggatattatcacgccaaaagacaagcaaaaaatggtggaaaaagccaaagtagaggttaaaaaaatccagcaacaatacgatcaagggctgctcactgaccaagagcgttacaataagatcattgacacttggactgaagtcaatgacaaaatgagtaaagaaatgatgaccgctatcgcgcaagataaagagggctttaactctatttatatgatggcagatagcggcgcaaggggtagcgcggcgcaaatccgtcagctttcagcgatgaggggtcttatgacaaagccggacggcagtatcattgaaacgcccattatttctaactttaaagaggggttgaatgtcttagaatacttcaattccacgcatggcgctagaaagggcttagcggatacagcgctaaaaacagccaatgcggggtatttgaccagaaagctcattgatgtttcgcaaaatgtcaaggtggtgtctgatgattgcggcacgcatgaagggattgaaatcacggatattgcggtggggagtgagctgattgaacctttagaagagcgtatttttgggcgcgttttattagaagatgtgatcgatcccattacgaatgaaatcttgctttatgcggacactttgattgatgaagagggtgctaaaaaggtggttgaagccgggattaaatccattacgatccgcaccccagtaacttgtaaagcgccaaagggcgtgtgcgcgaaatgctatggcttgaatttgggcgaaggcaagatgagttatccgggtgaagcggtgggcgtggtagccgcgcaatctattggggagcctggaacgcagctcactttaaggactttccatgtgggcgggacagcgagcaggagtcaggatgagcgcgaaatcgtagcgagcaaagaaggttttgtgcgtttttacaaccttaggacttacacgaataaagagggtaaaaacattatcgctaaccgccgtaacgcttctattttagtggtagagcctaagattaaagcgccttttgatggggaattacgcattgaaacggtttatgaagaagtcgttgtgagcgtgaaaaatggcgatcaagaagctaaatttgttttaaggagaagcgatattgtcaagccaagcgaattagccggcgttggcggtaagattgaggggaaagtgtatttgccttatgctagtgggcataaggtgcataaggggggaagtatcgctgatattatccaagagggctggaatgtgcctaatcgcatcccttatgcgagcgaattgctagtcaaggataatgaccctattgcgcaagatgtgtatgccaaagaaaaaggcgtaatcaaatactatgttttagaggctaaccatttagagcgcacccatgggatcaaaaagggcgatatggtgagtgaaaaaggcttgtttgcggtgatagctgatgataatggtagggaagccgctcgccattatatcgctaggggttctgagatcttgattgatgataatagtgaagtgagcactaatagcgtgatttctaaacccacgactaacactttcaaaacgattgccacatgggatccttacaacacccctatcattgcggactttaaaggtaaggtgggttttgtggatgttatcgcaggggttacggtcgctgaaaaagaagacgaaaataccggtatcacaagcttagtggtgaatgattacattccaagcggatacaaaccaagcttgtttttagagggggctaatggcgaagagatgcgttatttcctagagccaaaaacctctatcgccattagcgatggctctagcgtggagcaagctgaagtgttagcgaaaatccctaaagcgaccgttaaatctagggatattaccgggggtctcccaagggtttcggaactctttgaagcgagaaaacccaagcctaaagatgtggcgatcctttctgaagttgatgggattgtgagttttggcaaacccattcgcaataaagaacacatcatcgtaacttctaaagatggccgttccatggattattttgtggataaaggcaagcaaattttagtgcatgccgatgaatttgtgcatgcgggagaagcgatgacggacggagtaatttcaagccatgatattttaaggatcagtggcgaaaaagagctttataaatacattgtgagcgaagtccagcaagtgtatcgcaggcagggggtgagcattgcggacaagcacattgaaatcattgtttctcaaatgctaagacaggtgcgtattttagacagcggggatagcaagtttattgaaggggatttagtcagtaaaaaacttttcaaagaagaaaacgctcgtgtgatcgctttaaaaggcgagccagcgattgctgaaccggtgcttttagggatcactagagcggctattgggagcgatagcatcatctcagcggcctctttccaagaaacgactaaagttttaacagaagccagtatcgctatgaaaaaagactttttagaggatttgaaagagaatgtggtgttggggaggatgatccctgtgggaacaggcatgtataagaataaaaaaatcgtgttaagagcgcttgaggataactctaaattt

SEQ ID NO: 102 - DNA, 1197 bp, Artificial Sequence
  Description of Artificial Sequence:  Synthetic Primer
atggcaaaagaaaagtttaacagaactaagccgcatgttaatattggaaccattgggcatgtagaccatggtaaaacgactttgagtgcagcgatttcagcggtgctttctttgaaaggtcttgcagaaatgaaagactatgataatattgataacgcccctgaagaaaaagaaagagggatcactatcgctacttctcacattgaatatgagactgaaaacagacactatgcgcatgtggattgcccaggacacgctgactatgtaaaaaacatgatcaccggtgcggcgcaaatggacggagcgattttggttgtttctgcagctgatggccctatgcctcaaactagggagcatatcttattgtctcgtcaagtaggcgtgcctcacatcgttgttttcttaaacaaacaagacatggtagatgaccaagaattgttagaacttgtagaaatggaagtgcgcgaattgttgagcgcgtatgaatttcctggcgatgacactcctatcgtagcgggttcagctttaagagctttagaagaagcaaaggctggtaatgtgggtgaatggggtgaaaaagtgcttaaacttatggctgaagtggatgcctatatccctactccagaaagagacactgaaaaaactttcttgatgccggttgaagatgtgttctctattgcgggtagagggactgtggttacaggtaggattgaaagaggcgtggtgaaagtaggcgatgaagtggaaatcgttggtatcagacctacacaaaaaacgactgtaaccggtgtagaaatgtttaggaaagagttggaaaaaggtgaagccggcgataatgtgggcgtgcttttgagaggaactaaaaaagaagaagtggaacgcggtatggttctatgcaaaccaggttctatcactccgcacaagaaatttgagggagaaatttatgtcctttctaaagaagaaggcgggagacacactccattcttcaccaattaccgcccgcaattctatgtgcgcacaactgatgtgactggctctatcacccttcctgaaggcgtagaaatggttatgcctggcgataatgtgaaaatcactgtagagttgattagccctgttgcgttagagttgggaactaaatttgcgattcgtgaaggcggtaggaccgttggtgctggtgttgtgagcaatattattgaa

SEQ ID NO: 103 - DNA, 1215 bp, Artificial Sequence
  Description of Artificial Sequence:  Synthetic Primer
gtgttaatcgttcaaaaatacggcggcacgagcatgggcagcatagaaaggatccacaatgtcgctcaaagggttttagaaagcgttacattagggcatcaagtcgtggtggtggtttcagcgatgagcggcgaaaccgacaggcttttagaatttggcaagaattttagccataaccctaacaagcgagagatggacaggattgtaagcgtgggggaattggtttcaagtgcggctttgagcatggcgttagaaaggtatgggcatagagccatttccttgagcgggaaagaagcgggcattttaaccagctcgcattttcaaaacgccgtgatccaatccattgacaccaaacgcatcacagagcttttagaaaaaaactacattgtggtgatcgctgggtttcaaggcgctgatattcaaggtgaaacaacgactttagggcgtggggggagcgatttgagcgcggttgctttggccggggctttaaaagcgcatttgtgcgaaatctatacggatgtggatggcgtttataccaccgatccgcgcattgaagaaaaggctcaaaaaatcgcgcaaatcagctatgatgaaatgcttgaactggcttctatgggggctaaagttttattaaaccgctcggtggaattagccaaaaagctcagcgtgaagttagtgactcgcaattcgtttaaccatagcgaaggcacgctcattgtggctgaaaaagactttaaaggagaacgcatggaaacccctatagtgagtgggatcgcattggataaaaatcaggctcgtgtgagcatggagggcgtggaagatcggccaggcattgccgctgaaatctttggcgctttagcggagtatcgcattaacgtggatatgatcgtccaaacgatcggcagagacggcaaaaccgatttggattttacgatcgttaaaacccaaatagaagaaaccaagcaagccttaaagccttttttagcgcaaatggattccattgattatgatgaaaatatcgctaaagtctccatagtgggcgtgggcatgaagtcgcattctggggtggcgagtatcgcttttaaagccctagccaaagacaatatcaatatcatgatgatttctacaagcgagattaaaatttcggttttgattgacattaaatacgctgaattagctgttagaactttgcatgcggtgtatcaattagatcaa

SEQ ID NO: 104 - DNA, 2199 bp, Artificial Sequence
  Description of Artificial Sequence:  Synthetic Primer
atgaaaaaacacatcctttcattagctttaggctcgcttttagtttccactttgagcgctgaagacgacggcttttacacaagcgtaggctatcagatcggtgaagccgctcaaatggtaacaaacaccaaaggcatccaacagctttcagacaattatgaaaatttgaacaaccttttaacgagatacagcaccctaaacacccttatcaaattgtccgctgatccgagcgcaattaatgcggtgcgggaaaatctgggcgcgagcgcgaagaatttgatcggcgataaagccaactcccccgcctatcaagccgtgcttttagcgatcaacgcggcggtagggttttggaatgtcgtgggctatgtgacgcaatgtgggggtaacgccaatggtcaagaaagcacctcttcaaccaccatcttcaacaacgagccagggtatcgatccacttccatcacttgttctttgaacgggcataagcctggatactatggccctatgagcattgagaattttaaaaagcttaacgaagcctatcagatcctccaaacggctttaaaaaacggcttacccgcgctcaaagaaaacaacgggaaggtcagtgtaacctatacctacacatgctcagggcaagggaataataactgctcgccaagtgtcaacggaaccaaaaccacaacccaaaccatagacggcaaaagcgtaaccaccacgatcagttcaaaagtggttggtagcatcgctagtggcaacacatcacatgtcatcaccaacaaattagacggtgtgcctgatagcgctcaagcgctcttagcgcaagcgagcacgctcatcaacaccatcaacgaagcatgcccgtatttccatgctactaatagtagtgaggctaacgccccaaaattctctactactactgggaaaatatgcggcgctttttcagaagaaatcagcgcgatccaaaagatgatcacggacgcgcaagagctagttaatcaaacgagcgtcattaacagcaacgaacaatcaactccggtaggcaataataatggcaagcctttcaaccctttcacggacgcaagttttgcgcaaggcatgctcgctaacgctagcgcgcaagctaaaatgctcaatttagcccatcaggtggggcaagccattaacccagagaatcttagcgagaattttaaaaattttgttacaggctttttagccacatgcaataacaaatcaacagctggcactggtggcacacaaggttcagctccaggcacagtgaccactcaaactttcgcttctggttgcgcgtatgtggagcaaaccctaacgaacttaggcaacagcatcgctcactttggcactcaagagcagcagatacagcaagccgaaaacatcgctgacactctagtgaatttcaaatctagatacagcgaattaggcaacacctataacagcatcaccaccgcgctctccaaagtccctaacgcgcaaagcttgcaaaacgtggtgagcaaaaagaataacccctatagccctcaaggcatagagaccaattactacctcaatcaaaattcttacaaccaaatccaaaccatcaaccaagaactagggcgtaacccctttaggaaagtgggcatcgtcaattctcaaaccaacaatggtgccatgaatgggatcggtattcaggtgggctataagcaattctttggccaaaaaagaaaatggggcgctaggtattacggcttttttgattacaaccatgcgttcatcaaatccagctttttcaactcggcttctgacgtgtggacttatggttttggagcggacgcgctttataacttcatcaacgataaagccaccaatttcttaggcaaaaacaacaagctttctttggggctttttggcgggattgcgttagcgggcacttcatggctcaattctgagtacgtgaatttagccaccgtgaataacgtctataacgctaaaatgaatgtggcgaatttccaattcttattcaatatgggagtgaggatgaatttagccagatccaagaaaaaaggcagcgatcatgcagctcagcatgggattgagttagggcttaaaatccccaccatcaacacgaactattattcctttatgggggctgaactcaaatacagaaggctctatagcgtgtatttgaactatgtgttcgcttac

SEQ ID NO: 105 - DNA, 720 bp, Artificial Sequence
  Description of Artificial Sequence:  Synthetic Primer
ttggactcttttcattcatttaatcagcatgcatttaatcggcatgccaaaacttatcacctttttgctcatatccagcagcaaatcgctatctgtcttgttcaatttttaaaacaaaaacattacgctaaagttttggatcttggatcagggagtggggctgtttttaacgctttagagcggcaaaatattttgattgaagagtttatcgctttggataattccataaacatgctcaaattacaccccacgcattctattaacattcaaaaaatctctttagagcatgcggattttgaagaacatgttttttgcacttatgatctggttgtgtcttcttcttctttacaatgggcaagggatttaaaaagcgttttagaaaaaatcgctctttctagtaaggaggtggctttagctatccatacggattttagtttgcatgaagtgcatgagtttttaggcacgccttcgcctttaagggatcttaaaacgctcaaatccttgattaaaaacgcttttaaacattttcaaatagaattagaaaacaagcgcttcgctctttatttcaaccgcaaacaagattgcttgaattaccttaaaaaatgcggtcttttagggggttcaacgctgagtttcaagcaaaaaaaacatttttttcaaaacatggcgtttgaaaaattgagctatgaagtgttactcttttctgggatcaagcgttct

SEQ ID NO: 106 - DNA, 984 bp, Artificial Sequence
  Description of Artificial Sequence:  Synthetic Primer
ttgagcggctttaaccccttaaattctcccttagtcgcaagctcttctcttagcttgaaagaagcctattatttagaaaaattatctcttaaaaaagggtttaaaatccattacaagatgaccaaagatagcttaaaccttttagaaaaaagcgatttgtgcgttttgtttgggggtttttcaaacgcttgtttgaatgaaaacgaacgatggattttagaaagcattagccactcaaaacgcccctacgccttgttaagacccttacaagatacaagagacttgcaagaaaattgcctttttgcgtcttatgaaatccacacggaagcggcgattttggccttgattttaaggggcattttggaacaaacttcccaattaaaagggcatgttttagaaaaaatagatgtggggtatttaagctctgaagcgaacatgagcgaagaggaattgcaagagcttatcgcgcttattgttaaagcaaaaaaaagggcacttgttttaaatagagaaatcactaagcatgctaacaacgcttttttatacacccttttaagcgagttgcaaaattacctagaaattttacacatcccttgctatgattcaagtgcaacgaccgctttttatgattttaaagatcaagaatggctgctagaaacagcctttaaagagggcattttgccttttaaatcgcaactccaatcaaaagatttagagcttttagagcgaatcagtgaggctaacggctcgtttgtctatgtttcttacaagagccttgaaacccccaaattatctttttccaagcaatttaagatcgctaataagattgagcattctaaagcggggtttcaaatctccaatcaaacgctagaatgcgagttagaagaaaacccccatttgaagggtttgattgcgattttagaaggggcgttttttgacgcttacccttatatccctattttatcccactctcaaggaatttca

SEQ ID NO: 107 - DNA, 1500 bp, Artificial Sequence
  Description of Artificial Sequence:  Synthetic Primer
atgatcagtctcatagaaaaagccccttacattccctaccccctagctctttatgaaaaattagagcaaccacacaccttgctttttgaaagcgctgagattgagagcaaagcacacaccaaatcccttttaatggctaaagcctgtttgaagctcatttgcaaccacaacatcgtaactatcactagcctgacgcctaatggcggggcatttttgcaaaaattgagcgcgttttttaaaacgcccatacaagacaatgccctaattttaacctacaccaaaaataaaaaaacgcaagatgagtttttaaaactctttgagcctagcccttttgacgctttaagggggctttttaaaagcgttaaaacaaaacccaaacacccctttacgcttttaagcgcgggtgttttttcttttgaaatgctcaatttttttgaagatttgcctcacttaaaagcgaaagacaacacagtgcatgactttattttttatctcgcgcaaaatttgatcatcatagaccataaagaaaaaagcgttgaaatcttgggggcgtgttttgatgagcgctttaaaacagagatagcccaagaattacaagacttaaaagagttggctaaaagcatcaaaagcgactttgtccctaaaaaatccaagcaaagtagagaagttagcgctaattgtagcgatagcgagtttgaaaaaagagtgctatccttacaagaagaaatcaaaaaaggcgagatttttcaagcggtgttgtcgcgcagcttttatatggagtgcttggagggtttgagcgcgtattaccatttaaagctaactaatcctagcccctatatgttctatatcaaagacagcgatttcattctttttggggcaagccctgagagcgctttaaagtacaacgctttaaccaacacggctgaaatttatcccattgctggcacccgtttaaggggtaaggacaaacaggggaatattgattacgatttggatagtaaaatggaatttgatttgcaacacgactataaagaaagggctgaacacatcatgctagtggatttagccagaaacgacatggccagagtttcaaaaaaacgctattgcgacaagcttttaaaagtggataagtattccaatgtcatgcatttagtctcaagggttgtgggggaattgaaaaaagggtgcgatagtttgcatgcctacaggagctttatgaacgccggcacgcttagcggggcgcctaaaatctctgcgatcaggctcatttaccaattagaaaaccaaaggagaggctcttatggggggagcgtggggtatttaaatagcgagggttctatggattcttgcatcaccatccgttcatgttttgtcaaaaacaatagggccgtgatccaagcaggagccggtattgtgctagacagcgtgccacaaaacgaagcgaatgaaacaagagccaaagcgcaagcccttattgatgcgatcaggaaaacaagctta

SEQ ID NO: 108 - DNA, 3105 bp, Artificial Sequence
  Description of Artificial Sequence:  Synthetic Primer
atgatagaaaagatcattgatttaagcgttaaaaacaaactccttaccactttagtcactctactcatttttttagcctctttgtgggcgataaaaagcgttcgtttagacgctttgccggatttaagccccgctcaagtggtcgtgcaaatcacttaccccaatcaaagccctaaaatcgtgcaagagcaggttacttacccgttagtttctactttcatgagcatcgctaacattgacacggttagggggatttctagctatgagagcggtttgatttacatcatttttaaagacggcgtcaatctgtattgggctagggatagggttttagagcaattaaaccgagtgagtaacctccctaaggacgctaaagtagaaatagggagcgattccacttctattggttgggcgtatcaatacgctctatctagcgatagcaagaatttaagcgatttgaaagtcttgcaagatttttattaccgctacgctcttttaggggttgatggggtgagtgaggttgcaagcgtggggggctttgtaaaagattatgaagtaacgcttcaaaacgattctctgatccgctataacttgagtttagagcaagtcgctaacgcgattaaaaattccaataacgataccggtgggggcgttattttagaaaacgggtttgaaaaaattataagatcgcatggctatatccaatctttgaaggatttagaagaaattgtggttaaaaaagaaggggctatccctttaaaaatcaaagatatagccagcgttaggctaacgcccaaaccacgccgaggggcggccaaccttaatggcgataaggaagtggtgggcgggattgttatggtgcgctatcacgctgacacttataaggtgcttaaagccattaaagaaaaaatcgccaccttacaagcgagtaaccctgatgtgaaaatcaccagcgtgtatgacaggagcgaattgattgaaaaaggcattgacaatttaatccacacgctcatagaagaaagcgtcattgtgctagtcattattgcgatttttttactgcatttcaggagcgctttagtggtgattatcactttgcctttaagcgtgtgcatcagtttcttgctcatgcgttatttcaatattgaagcgagcattatgagtttagggggcattgcgatcgctataggggcgatggtggatgcggctattgtgatggtagagaacgctcacaagcacttgcaacacattgatgtaaaggacaacgctcaaagggttaatggcattatagaaggggttaagcatgtggggggcgcgatattttttgctttaatgatcatcgtggtttctttcttgccaatttttgcactcaccggccaagaagaaaagctttttgcccctttagcttacaccaaaacctttgccatgctagtaggagcgctgctttctatcaccatggtccctattttaatggtatggctcattaaagggcggattttagaagagtctaaaaacccgattaacgcttttttcatgaaaatttatggcgtgagcttgaatgttgtgcttaaattcagatacgcttttttaatagcaagcgtcctgggtttagggggcttgtatgtagcgtataaaaaactcaactgggaatttatcccccaaatcaatgaaggggtagtgatgtatatgcctgtaaccattaatggcgtgagcattgataccgctttagaatatttgaaaaaaagcaatagcgctatcaagcgattggattttgtcaaacaagtttttggtaaagtggggcgcgctaacaccagcaccgatgctgccggcttgagcatgatagaaacctacattgaattaaagccgcaaaacgaatggaaagaaaagctcagttataaagaagttagggataaattagaaaaaaccctgcaattaaaaggcttgaccaattcatggacttaccccattcgtgggagaacggacatgctcttaaccgggattagaacgcccctaggcatcaagctctatggcaatgacacggataaattacaagaattagcgatccttatggagcaacagctcaaaaccctaaaagagagtttgtccgtctttgccgagcgatccaataacggctactacatcacgctggatttgaacgatgaaaatctggctcgttatggcatcaataaaaaggccgtgttagatgcgattaaattcgctttgggaggagccacgctcactaccatgattaagggtgtagaaaactatcccatttctttacgcttagaagacacagaaagaaacaccattgaaaaattaaaaaacctctacatcaaaaccgcttacaattacatgcccttaagggagttagcccgcatctattacgacaactcgccggcggtgttaaagagcgaaaagggcttgaacgtgaattttatttatattgtgccgcaaaatggtatcagctctgatgcttacagacaactggctcaaaaagcgctagaaaaaatccaattgcctaacgggtattattatgaatttagcggcgaaagccagtatttagaagaagcgtttaaaaccttgcaatacatcgtgccggtgagcgtgtttatcatttttattttaattgtctttgctttaaagaatctcaccaattccttactatgctttttcactctgccttttgcgtttttgggggggttaatttttatgaatctcatgggatttaacatgagcgtggcggcgttagtgggctttttggcccttttaggggtagcgagcgaaacggctattgtgatgattatttatttagaggatgcgtttcaaaaattcatcaaaacccctttaaaagagcaaaacagcaccactttaaaagaggccatcatgcatggggcggtgcttagggtaaggcccaagcttatgaccttttttagcattttagcttcactcattccaatcatgtatagccatggcacaggttctgaaatcatgaaatccatcgccgcgcccatgctagggggcatgataagcagcgttgttttaacgctttttattatccctacggcgtattttgtgatcaagaatgcgggaattaaaagcaatcaaaca

SEQ ID NO: 109 - DNA, 498 bp, Artificial Sequence
  Description of Artificial Sequence:  Synthetic Primer
atgtctgtatcgcatgttgctttaatcttaaggaaattgttttatcatagacaaggagtttttatgggcggtttttcagtgggaatgttgaaagattatgtggacatatttgtttttgcggtgcttggcgtggccagttttttagctttgtggtttgcgattgaaagggttattttttattctaaagtcgatttgaaagcttatgacgatatagatgccctgaatttggatttaaccaagaatctaaccattctctatgtgattttttctaacgcgccttatgtgggcttattagggacggttttagggattatggtgattttctatgacatgggcgtgagcggcgggatggacgctaaaacgatcatggtaggtttgtctttggctttaaaagcgaccgctctagggcttgctgtggcgattcccactttgatcgcttataatagcttgttgagaaaatccgatgttttgagcgaaaaattcaggatcatgaaaaaa

SEQ ID NO: 110 - DNA, 795 bp, Artificial Sequence
  Description of Artificial Sequence:  Synthetic Primer
atctcttttgccctatacgctatagggtttggctattttttactgcgcgaagacgccccagagcctttagcgcaagccgggaccactaaggttaccatgagtttagccagcatcaacactaattccaatacaaagactaatgctgagtcggctaaacccaaagaagagcctaaagaaaaacccaagaaagaagagccaaaaaaagaagaacccaaaaaggaggttacaaagcctaaacctaagcctaaacccaagccaaagccaaaaccaaaacctaagcctgaacccaaacctgaaccaaaacccgagcctaagcctgagcctaaagttgaagaggttaaaaaagaagagcctaaagaagagcccaaaaaagaagaagctaaagaggaagctaaagaaaaaagcgctcctaaacaagtaacaactaaggatatagtcaaagaaaaagacaagcaagaagaatccaacaaaacctctgagggggccacttctgaagctcaagcttataacccaggggtgagcaacgaatttttaatgaagatccaaaccgctatttcttctaaaaaccgctaccctaaaatggcgcagattaggggtattgagggcgaagtgttggtgagctttacgatcaatgctgatgggagcgttacggacattaaagtggtcaaaagcaacaccacagatattttaaaccatgcggctttagaagccattaaaagcgcggcacatctattccctaaaccagaagaaaccgtgcatctaaaaatccctatcgcttatagcttgaaagaagac

SEQ ID NO: 111 - DNA, 2073 bp, Artificial Sequence
  Description of Artificial Sequence:  Synthetic Primer
atgaaaaaatccctcttactctctctttctctcatcgcttccttatcaagagctgaagatgacggattttatacgagtgtgggctatcagatcggtgaagcggtccaacaagtgaaaaacacaggagcattgcaaaatcttgcagacagatacgataacttaaacaaccttttaaaccaatacaattatttaaattccttagtcaatttagccagcacgccgagcgcgatcaccggtgcgattgataatttaagctcaagcgcgattaacctcactagcgccaccaccacttcccccgcctatcaagctgtggctttagcgctcaatgccgctgtgggcatgtggcaagtcatagccctttttattggctgtggccctggccctaccaataatcaaagctatcaatcgtttggtaacacaccagcccttaatgggaccaccaccacttgcaatcaagcatatgggacaggccctaatggcatcctatctattgatgaataccaaaaactcaaccaagcttatcagatcatccaaaccgctttaaaccaaaatcaagggggtgggatgcctgccttgaatgacaccaccaaaacaggggtagtcaacatacaacaaaccaattataggaccaccacacaaaacaatatcatagagcattattatacagagaatgggaaagagatcccagtctcttattcaggcggatcatcattctcgcctacaatacaattgacataccataataacgctgaaaaccttttgcaacaagccgccactatcatgcaagtccttattactcaaaagccgcatgtgcaaacgagcaatggcggtaaagcgtgggggttgagttctacgcctgggaatgtgatggatatttttggtccttcttttaacgctattaatgagatgattaaaaacgctcaaacagccctagcaaaaacccaacagcttaacgctaatgaaaacgcccaaatcacgcaacccaacaatttcaacccctacacctctaaagacaaagggttcgctcaagaaatgctcaatagagctgaagctcaagcagagattttaaatttagctaagcaagtagcgaacaatttccacagcattcaagggcctattcaaggggatttagaagaatgtaaagcaggatcggctggcgtgatcactaataacacttggggttcaggttgcgcgtttgtgaaagaaactttaaactctttagagcaacacaccgcttattacggcaaccaggtcaatcaggatagggctttggctcaaaccattttgaattttaaagaagcccttaacaccctgaataaagactcaaaagcgatcaatagcggtatctccaacttgcctaacgctaaatctcttcaaaacatgacgcatgccactcaaaaccctaattccccagaaggtctgctcacttattctttggattcaagcaaatacaaccagctccaaaccatcgcgcaagaattgggcaaaaaccctttcaggcgctttggcgtgattgactttcaaaacaacaacggcgcaatgaacgggatcggcgtgcaagtgggttataaacaattctttggtaaaaaaaggaattgggggttaaggtattatggtttctttgattataaccatgcttatatcaaatctaattttttcaactccgcttctgatgtgtggacttatggggtgggtatggacgctctctataacttcatcaacgataaaaacaccaactttttaggcaagaacaacaagctttcagtagggctttttggaggctttgcgttagccgggacttcgtggcttaattcccaacaagtgaatttgaccatgatgaatggcatttataacgctaatgtcagcacttctaacttccaatttttgtttgatttaggcttgagaatgaacctcgctaggcctaagaaaaaagacagcgatcatgccgctcagcatggcattgaactaggttttaagatccccacgatcaacaccaactattattctttcatgggcgctaaactagaatacagaaggatgtatagcctttttctcaattatgtgtttgcttac

SEQ ID NO: 112 - DNA, 1206 bp, Artificial Sequence
  Description of Artificial Sequence:  Synthetic Primer
atgttagctaaaatgtcgtttatgcaaaatgttaaaaacattcaagaagtggaagtgagccataaaagggtgcttattagagtggattttaatgtgcctttagatgaaaatttgaatattaccgatgatacgcgcattagagagagcttgcccaccatccaatattgtattgacaacaaggctaaagatattattttagtgagccacttgggccgccctaaaggggttgaagaaaaattgagtttaaagccctttttgaaacgccttgaaagactcttaaaccatgaagtggttttttctcaaaatattgtgcaactcaagcaggctttaaacgaaaacgcgcccacaaggatttttcttttagaaaatatccgctttttaagaggcgaagaagaaaatgatgaaaatctggctaaagatttagcgagcttgtgcgatgtgtttgtgaatgacgcttttggcacgagccacagaaagcatgccagcacttatggcaccgccaaattcgcccctattaaagtgagcgggtttttactcaaaaaagaaattgattcgttttatcaagcgtttaaccaccctttacgccctctattgttgattgtagggggggctaaggtcagctccaaactcaccctattaaaaaacattttagatctcattgacaagctcatcattgccggggcgatgagcaacaccttcttaaaagctttaggctatgatgtgcaagattcttctgtagaagacgctctaatcaatgacgccctagaattattgcaaagcgcgaaagaaaaaaaagtcaaagtctatttacccatagacgctgtaaccactgatgatattctcaaccccaaacacattaaaatttcacccgtccaagacattgagcctaagcacaagatcgctgatatagggcctgcgagcttgaaattattttctgaagtcatagagagtgcacccaccattttatggaatggccccttaggcgtgcatgaaaaacaagaattcgctagaggcacaacctttttagcccacaaaatcgctgacacttacgctttctcgctcattggtgggggcgataccattgatgcgatcaatcgcgcgggcgaaaaggataacatgagctttatctctaccggtgggggagcgagtttggaattgttagagggcaaaattttaccttgttttgaggttttggacaaacgccat

SEQ ID NO: 113 - DNA, 1377 bp, Artificial Sequence
  Description of Artificial Sequence:  Synthetic Primer
gtggtgttattaacaatgacaaaacgactttttaaagggttgttagcggtttctcttgctgtgagtttgcatggtggtgaagttaaggaaaaaaagccggttaagccggttaaagaagatccgcaagaattagcggctaaaagggtggaagcgttcagtcgtttctctaatgtggtttcagaaattgaaaaaaaatatgtggataaaatcagcatttctgagatcatgactaaagcgattgaaggcttgctctctaatttggacgcgcattcagcgtatttgaatgaaaagaagtttaaggaatttcaagcccaaaccgagggcgaatttggggggcttgggatcacggtgggcatgcgcgatggcgttttaaccgttattgcccctttagaaggcactccagcttacaaggctggggttaagtcaggcgataacattttaaaaatcaataacgaaagcacgctgagcatgagcattgatgatgcgatcaacctcatgcgcggcaagccaaaaacccctattcagatcaccgttgtaagaaaaaacgagccaaaacctttagtgtttaacatcattagagacatcattaaactcccctctgtctatgtgaaaaagattaaagaaaccccttatctgtatgtgagagtgagtggttttgacaagaatgttaccaaatcggttttagaaggcttaaaagctaaccctaaggctaaggggatcgtgttggatttaaggggcaatcctggagggctattaaaccaagcggtgggcttgtctaacctcttcattaaagagggggttttagtctctcaaaaaggcaaaaataaagaagaaaatttagaatacaaggctaacggcagagccccttataccaatttgcctattgcggtgttagtcaatggcggttcagcgagcgcgagcgagatcgtcgcaggggcactgcaagatcacaaacgggccgtgattatcggtgaaaaaacctttggtaagggaagcgtgcagatgctgctccctgtcaataaagacgaagccattaaaatcacaaccgcacgctactatttgccgagcgggcgtaccattcaagctaaggggatcacgcctgatattgtgatttatccgggtaaagtgccagaaaatgaaaacaaattcagcttgaaagaagcggatctaaaacaccatttagagcaagagcttaaaaagattgatgataaaacccccaattccaaagaggcggataaagacaagaaaaacgaagaggaaaaagagattactcctaaaatgatcaacgatgatattcagctaaaaaccgctattgacagcttgaaaacctggtctatcgttgatgagaaaatggatgaaaaagcgcctaagaagaaa

SEQ ID NO: 114 - DNA, 1338 bp, Artificial Sequence
  Description of Artificial Sequence:  Synthetic Primer
atgaacgaaacgctttattgcagtttttgcaaaaaaccagaatcaagagatcccaaaaaacgccgcattatttttgcgagcaatctcaataaagatgtgtgcgtgtgcgaatattgtatagatgtgatgcatggggaattgcacaaatacgacaattctttattggcgctcaaaagagaccgattgagaagaatggaatctagcgcttatgaagaagagtttttactctcttacattccagcccctaaagagcttaaggcggttttagacaattatgtgatagggcaagagcaggctaaaaaggttttttccgtagccgtgtataaccattacaaacgcttatcttttaaagaaaaactcaaaaaacaagacaaccaagacagcaatgtggagttagagcatttagaagaagtggagttgagcaagtctaatattttactaatcggccctacaggatcaggcaaaactttaatggcgcaaactctggccaagcatttggatattcctatcgccattagcgatgcgactagcttgactgaagcgggctatgtgggcgaagacgtggaaaatattctcacaagattgttgcaagcgagcgactggaatgtccaaaaagcccaaaaaggcattgtgtttattgatgagattgataaaatcagccgtttgtcagaaaaccgctctatcactagagatgtttctggcgagggcgttcagcaagcgttgttgaaaatcgttgaaggttctttagtgaatatcccccccaaaggcggcagaaagcaccctgagggcaatttcattcaaattgacacgagcgatattttattcatttgtgctggagcgtttgatgggttagctgaaatcattaaaaaacgcaccacgcagaatgtgttgggtttcactcaagaaaagatgagcaaaaaagagcaagaagcgatcttgcatttagtccaaacccatgacctggttacttatgggcttatccctgagcttattggccgtttgccggttttaagcacgctagatagcatcagtttagaagcgatggtggatattttacaaaaacctaaaaacgctcttatcaagcaataccagcagcttttcaaaatggatgaggtggatttgatctttgaagaagaagccattaaagaaatcgctcaactcgcattagaaagaaaaaccggggctaggggcttaagggcgatcattgaagatttttgtttggatattatgtttgatttacccaagcttaaaggatcggaagtgcgtatcactaaagattgtgttttaaaacaggctgaacctttgatcattgctaaaacgcattctaaaattcttcct

SEQ ID NO: 115 - DNA, 1572 bp, Artificial Sequence
  Description of Artificial Sequence:  Synthetic Primer
atgcgagatttcaataacgctcaaatcacacgcttaaaagtgcgtcaaaacgctgtttttgaaaaattggatctggagtttaaagacggcttgagcgcgattagtggggctagcggggtgggaaaaagcgttcttattgcgagtcttttaggggcgtttgggcttaaagagagcaacgcttcaaacattgaagtggaattgattgcgccttttttagacactgaagaatacggcatttttagagaagatgaacatgaacccttagtcatcagcgtgattaaaaaagaaaaaacgcgctattttttaaaccaaacaagcctgtctaaaaacacgctcaaagcgttattaaaaggtttgattaaacgcttgtctaacgatagattcagccagaatgaactcaacgatattttaatgctctccttactggatggctatatccaaaacgaaaataaggcgtttagcccccttttaggcgcgcttgaagaaaaattcacccgattagagaagctagaaaaagaaaggcgattgttagaggataaaaagcgtttccaaaaggatttagaagaacgattgaattttgaaaaaatgaaattagagaggctggatttaaaagaagatgaatacgaacgccttttagagcaaaaaaaattgctttctagtaaggaaaaactgaacgataaaatcgctctggcgttagaggtgctagaaaatacccataaaatcacgcatgctttagagagcgtgggccatagcgcggagtttttaaaaagcgctttattagaagcgagcgctctattggaaaaagagcaggctaaattagaagagtgcgagcgtttggacattgaaaaagttctagaaaggcttggcatgctaagtgggatcattaaggattacgggagtattatgcatgctaaagaacgattagggcatgttaaaaacgaattgcacaacctaaaagaaattgatagtcattgcgaaacttaccacaaagaaatagagcgattaaaaaccgaatgcttgaaattgtgcgaagaaataagcggctttagaaaagagtatttagccggttttaacgctcttttaagcgctaaagcgaaagatttgctcctaaaaagccccagtttggttttagaagacgcccccatgagcgaaaaaggcgctcaaaaactcgttttgaatttgcaaaattcccaattagaaaccttaagctctggagaatacagccgtttgagactggcgttcatgcttttagaaatggaatttttaaaggattttaaaggcgtgttggtgttagatgaaatggattccaatttgagcggcgaagagagtttggcggtctctaaagcccttgaaaccttaagcagccattcgcaaatctttgccatttcgcaccaagtccatatcccagcgctcgctaaaaaccatattttagtcttcaaagaaaaccacaaaagccttgccaaaacccttaataacgaagaaagggttttagaaatcgcgcgcatgataggggggagcgagaatatagagagcgcgatttctttcgctaaggaaaaattaaaggcgcaagaa

SEQ ID NO: 116 - DNA, 483 bp, Artificial Sequence
  Description of Artificial Sequence:  Synthetic Primer
atgccagacgagctaagggcagaaaaaagctttccgtctaaaccctatgactctttaaaaaacaagagtgagtttgacagggtttatcaaaaggggtttaaaaaacataacccttttttttcgctctttgttttggatttgtcacaagagccgccaaaagaaaaagcgggctttaaagatccgctcttttgtaggcttaaagacaaaaaaacgctttatttattaggcttgagcgtgtccaaaaaagtcggcaacgccgtgaaacgaaaccttatcaaacgccgtttgcgttcgcttacattaaagcatgccgctctttgtcaagggcttgctttggtgtttgtgcctagaagcgattgttaccatttggatttttgggctttagaaaaacattttttagaaatgctaacttccattaaaaactatatgaacaaagccttaaaagacttgaaaaaaggaataactcatacctatgcgaaacaa

SEQ ID NO: 117 - DNA, 2238 bp, Artificial Sequence
  Description of Artificial Sequence:  Synthetic Primer
atgttaaaactcgctagcaaaacgatttgtttgtccctaatcgggtcattcaccgctgtagaagcctttcaaaaacaccaaaaagacggcttttttatagaagccgggtttgaaaccgggctattgcaaggcacacaaactaaagaacaaaccatagccacaactcaagaaaaacctaaacctaaaccaaagcccaaacccattacccctcaaagcacctatgggaaatactacatctcccaaagcaccgttttaaagaatgcgactgagttgtttgcagaggacaatatcaccaacttaaccttttattctttaacccctgtgtatgtaaccgcttacaaccaagaaagcgctgaagaagcaggctatggcgatagcagcttaattatgatacaaaacttcttgccttataatttaaacaatattgagctgagttatacagacaatcaaggcaatgtagtcagtttgggcgtgatagagactatccctaaacaatctcaaatcattctgcccgcaagcttgtttaacgatccgcagcttaacgctgatggcttccaacagctccaaactgccaccacacgattttctgatgccagcacgcagaatctgtttgataagctcagtaaggttacaaccaatcttcaaatgacttatatcaattacaaccaattttctagcggtaatggcagtggttctaaacccccatgccctccatacgaaaaccaagaaaactgcacggctaaagtgccgcctttcacctctcaagacgccaagaatttgaccaatttaatgctgaatatgatggcggtgtttgattctaaatcttgggaagatgccgttaaaaacgctccctttcagtttagcgacaacaacttgtcagcgccatgttattctaattattccacatgcgtgaatccttacaacgatgggcttgttgatcctaaattgatcgctaaaaataaaggagatgaatacaatatagaaaacgggcaaacaggctcagtgatattaacgccgcaagatgttatctatagctatagggttacgaataatctttatgtgaatctcttacccccaagaggaggggatttagggctagggtctcaatatggcggccccaatggtccaggcgatgatggcaccaattttggcgctttagggatattgtctcctttcttagaccctgaaatactgtttggcaaagaattgaataaagtcgccatcatgcaattaagagacattatccatgaatacgggcacactttaggctatacgcataatgggaacatgacttatcaaagggtgcgcatgtgtgaagaaaacaatgggccagaagagcgctgtaagggcgggaaaatagagcaagtggatgggcaagaagtgcaagtatttgacaacgggcatgaagtgcgagacaccgatggctctttctatgatgtgtgttctcgttttggcggccaaaatcagcccgctttccctagcagttaccccaattccatttatactgattgctctcaagtccccgctgggcttataggcgttactagcgcggtttggcaacaactcattgatcaaaacgccctaccggtggattacactaatttgagcagccaaaccaactatttaaacgctagtttgaacacgcaagattttgcgaccactatgcttagcgcgatcagtcaaagcctttcatctactagatctagcgccactacctatcgcacttcaaaaacctcacggccctttggagcccccctattaggcgttaatcttaaaatgggctatcaaaaatactttaatgattacttagggttgtcttcttatggcatcatcaaatacaactacgctcaagccaataacgaaaaaatccaacaattaagctatggcgtgggaatggatgtgttgtttgattttatcaccaattacactaacgaaaagaaccctaaaaacaatctaaccaagaaagttttcacttcctctcttggggtgtttggggggttaaggggcttatacaatagctattatttgttgaaccaatacaaagggagcggtaatttaaatgtgaccggtgggttgaattaccgctacaagcattctaaatattctgtaggcattagcgttcctttagtccagttgaaatctagagtcgtttctagcgatggcgcaactaccaattctatcaccctgaatgaagggggcagccattttaaagtgttttttaattacgggtggattttc

SEQ ID NO: 118 - DNA, 909 bp, Artificial Sequence
  Description of Artificial Sequence:  Synthetic Primer
atgaaaaagattattcttgcatgccttatggcttttgtgggtgccaatttaagcgcagagcctaagtggtatagcaaggcctacaacaaaacaaacacccaaaaaggctatctttatgggagtggttcagccacttctaaagaggcttctaaacaaaaagcgttagcggatttagtggcgtctattagcgtggtggttaattcccaaatccatattcaaaaaagtcgtgtggacaataagttaaaatccagcgattcgcaaacgattaacttaaagaccgatgacttggaattgaataatgtagaaattgtcaatcaagaagtgcaaaaagggatctactacaccagagtaaggatcaatcaaaacttgtttttgcagggtttaagggataagtataacgctctttatgggcagttttccaccttaatgcctaaggtttgtaaaggggtttttttacagcaatccaagagcatgggggatttattggctaaagcgatgcctatagaaaggattttaaaagcgtattctgttccggtgggttcgttagaaaattatgaaaaaatctattatcaaaacgctttcaaacctaaagtgcaaatcacttttgataacaacggcgatgcggaaatcaaaagcgctctcataagcgcttatgccagagtgctaacccctagtgatgaagaaaaactctatcaaatcaaaaatgaagttttcacagacagtgctaatggcatcacgcgcattagagtggttgttagcgcgagcgattgtcaaggcacgcctgtattgaatagaagccttgaagtggatgaaaagaataagaattttgctatcacgcgcttacaatctttgctttataaagaactgaaagattatgccaataaagaagggcaaggcaatacggggtta

SEQ ID NO: 119 - DNA, 3633 bp, Artificial Sequence
  Description of Artificial Sequence:  Synthetic Primer
atgaaagagaataaagcttttacgcatttgcacttgcacacagaatattcgcttttagacggggcgaacaagattaaaattctagccaaacgcgttaaagaattgggcatgaaaagcgtgagcgtaactgatcatgggaacatgtttggagcgattgatttttatacgagcatgaaaaaagaaggcattaagcctatcatcggcatggaagcgtatatccataatgatgacaacctttctagcaaagaaaccaagcagcgtttccatttatgcttgttcgctaaaaaccaagagggctatgaaaatttgatgttcttaagctctatggcgtatttagaggggttttattatttcccacgcatcaataaaaagcttctaaaagagcattctaaaggcattatcgcttctagcgcatgcttgcaaggggaagtcaattaccatttgaataccaataatgagagaaaccgcaagtatggggctaaaggctatgatgaagctaaaaaaatcgcttgcgaataccaagagatttttgaagacgatttttatttagagatcatgcgccatggcattttagatcagcgattcattgatgagcaagtcattaaaatgtctttagaaacagggttaaaaatcattgccaccaacgacacccactacaccatgcctaatgacgccaaggctcaagaagtggcgatgtgcgtagcgatgggtaaaaccctaaacgataaggggcgcttgaaacactccgtgcatgagttttacattaaatcccccgaagaaatggcaaagctctttgcagatattccagaagctttagaaaacacccaagaaatcgctgataaatgcgttttagagattgatttaaaagacgataaaaagaaccccccaacccccccaagcttcaaattcactaaagcttacgctcaaaatgaggggctgaattttgaagatgacgcttcttattttgcctataaggctagagaaggcttgaaagagcgcttagttttagtaccaaaagaaaagcatgatcaatataaagagcgcctagaaaaagaaattgaagtcattacgaacatgaaattcccagggtatatgctgattgtgtgggattttatccgttatgctaaggaaatgggcattcctgtagggcctggtagggggagtgcggccgggagcttggtggcttttgctttaaaaatcacggatattgaccctttgaaatacgatttgctctttgaaaggtttttaaaccccgaaagaatcagcatgcctgatattgatacggatttttgccagcgccggcgtaaggaaatcatagaatacatgattgaaaaatacggcaaatacaatgtggcacaagtcatcacttttaataagatgttggctaaaggcgtgatcagagatgtcgcaagggttttggacatgccctataaagaagccgatgattttgccaaactcatacccaaccgcttaggcatcacgcttaagggctatgaaaaaaatggcgagtttatcgagggagcgtgggaattagagcctaaaatcaaggaattagtagagagtaatgaattagccaaacaagtgtgggagtattcgctcaatttagagaatttaaaccgcaacgcaggcgtgcatgccgcagccttagtggtggatagccaaaaagagttgtggcacaaaacccctttgtttgcctctgaaaagaccggcggtatcgttacgcaatattccatgaagtatttggagccggtggatttgatcaagtttgactttttggggcttaaaaccttgaccgtgattgatgatgcgcttaaaatcattaaaacacaacacaaaattagcgtggattttttatcgttggatatggacgatccgaaagtgtataaaacgatccaaagcggggatacggtggggatcttccagattgaatccgggatgtttcaagggcttaacaagcgcttaaggccttcaagctttgaagacattatcgccattatcgcgctaggcagaccagggcctatggaatcaggcatggtagatgattttgtgaacagaaagcatggcgttgagcctatcgcttatgcgtttaaagaattagagccgattttaaagcccacttacggcacgatcgtctatcaagagcaggtgatgcaaatcgtgcaaactatcggcggtttcagtttgggtgaagcggatctcatccgccgcgctatggggaaaaaagacgctcagatcatggcggacaataaggctaagtttgtagaaggcgctaaaaatttagggcatgatggccaaaaggcggctaatttgtgggatttgatcgttaaatttgccggctatggtttcaacaaatcgcattcggccgcttatgcgatgatcactttccaaacggcgtatttaaagacttattacaagcatgagttcatggcagcgatgctcactagcgaatccaataagattgaatccgtggcgcgctatattgatgaggtcagggctttagaaattgaagtgatgcctccgcatatcaattcttctatgcaagatttcagcgtggcggagtttaaaaatcaaaagggcgagttagaaaagaaaatcgtgtttggtttgggagcgattaaaggagttgggggtgagccgattaaaaacatcattgaagaaagggctaaaggggattataagagtttggaagattttatttcacgggtggatttttctaaactcactaaaaaatctttagagccattagtgaaatcagggagcttggataatttaggctacactagaaaaaccatgctcgctaacttggatctgatctgtgatgccgggcgcgctaaagacaaggctaatgaaatgatgcaagggggtaattctctttttggagccatggagggcggaaccaaagagcaggttgttttggacatgattgatttgggcgaacatgacgctaaaacgcttttagaatgcgaatacgaaactttaggcatccatgtttcaggcaaccctttagacgagtttaaagaagaaattaagggttttaaaaatttagtcaaaagcattgatattgaagagttagaaatcggctcgcaagcttatttgctcggtaaaatcatggaagttaaaaagaaaattggcaaacgaagcggtaagccttatggcatagcggacattttggatcgatacggcaagtttgaactcatgctttttgaaaagcaattaaacgccttagaagagttggacattaataagcctttagtgttcaaatgcaagattgaagagcaagaagaagtggtgcgattgaggctttttgaaatcttggatctagagagcgctagagaggttaaaatccctaaagcccgttataaagaccctgaaaagcaaaaagaagaggtgcgcgaaatcccccccatggaaatgcttgcctctagttcttgctctttagcgatcgtgttagaaaacgatgtgaaaaaagagtttttaagacaaatcaaagagagcgctttaaaacaccagggcaaacgccccttgtatttgatcatcaaagataaggataagcaattcaaaatccaaagcgatttaatggtaaatgaaaagattaaggacgattttaaagggttagagtggagggatttagct

SEQ ID NO: 120 - DNA, 558 bp, Artificial Sequence
  Description of Artificial Sequence:  Synthetic Primer
atgacgcttttagtaggtttaggcaaccctactttgcgttacgctcacaccagacacaacgctggttttgatattttagattcactcgttagcgaattggatctttctttcactttttctcccaaacacaacgcttttttatgcgtttataaggattttatcttcctaaagccacaaacttacatgaatttaagcggcgagagcgttttaagcgctaaaaatttttacaaaaccaaagagcttttaattgtccatgacgacttggatttacctttgggcgttgtgaggtttaaaaatggtggggggaatggagggcataatggcttaaaatccattgatttgttgtgttctaattcttattatcgcttgagggtggggatttctaaaggaataggcgtaattgagcatgtgctttcaaaattccacaaaaacgaagagcctttaaaaaacgctgcgtttgaacatgccaaaaacgccttaaaattttttatagaaagccatgattttaacgctatgcaaaatcgtttcacgcttaaaaaacctttaaaaatagaaagt

SEQ ID NO: 121 - DNA, 1437 bp, Artificial Sequence
  Description of Artificial Sequence:  Synthetic Primer
atgaaaaaatccctttgtctgtctttctttctgactttctctaaccctcttcaagcccttgtgatcgagcttttagaagaaatcaaaacttcgccgcataaaggcacttttaaggctaaagtccttgattctaaaaaaccaagacaagttttaggcgtttataatatctccccacacaaaaaactcacgctcactatcacccacatatccactgcaatcgtctatcaaccccttgatgaaaaactttctttagaaacaaccttaaaccctaaccgccctactatccctagaaacacccagattgttttttcttcaaaagaattgaaagagtcgcacccgcaccaaatgccttctttaaacgcgcccatgcaaaaaccacaaaacaaaccccattcatcgcaacaaccttctcaaaacttttcttacccagagcccaaactaggctctaaaaactctaaaaacagccttttacagcctttagcaattcctagcaaaataagtcccactaacgaaactcaaacgccaacaaacgacactaaaccccctttaaagcattcttcagaagatcaagaaagcaacctctttataacgccacccactgaaaaaacgctccctaacaacacctctaacgctgatattagtgaaaacaatgaaagcaatgagaataaagataatgtggaaaaacaagccattagagatgctaatattaaagaatttgcatgcgggaagtgggtctatgacgatgaaaatttacaagcctaccgcccaagcattttaaaacgcgttgatgaagacaaacaaactgcaacagatattaccccttgcgattacagcaccgctgaaaataaaagcggtaaaatcattaccccctatactaaaatctccgttcataaaacagagcctttagaagagccacaaacttttgaagctaaaaataatttcgccattcttcaagccagaagctctacagaaaaatgcaaaagggctagagcaagaaaagacggcacgactaggcaatgctatctaatagaagagcctttaaaacaagcatgggagagtgagtatgaaatcaccacgcaattagtgaaagccatttatgagcgccccaaacaagacgatcaagtagagccgactttttatgaaaccagcgaattggcttattcttccacacgaaaaagcgaaataacgcacaatgaattgaatttgaatgaaaaattcatggaatttgtggaagtgtatgaggggcattatttaaacgatataattaaagagagcagtgaatataaagaatgggttaaaaaccatgtgcgctttaaagaaggggtgtgcatggctttagaaatagaagaacagccacgagctaaaagcacgcctttgagtattgaaaactctcgtgtggtatgtgtcaaaaaggggaattatttattcaacgaagtt

SEQ ID NO: 122 - DNA, 813 bp, Artificial Sequence
  Description of Artificial Sequence:  Synthetic Primer
atgaatgcattcaagcgtattattagtgtgggggtaattgctttaggtttgtttaaccttttagacgccaaacaccacaaagagaaaaaagaaaaccacaaaatcactcgtgagcttaaagtgggcgctaaccccgttccgcatgcgcaaatcttgcaatcagtcgtggacgatttgaaagagaaagggatcaaattagtgatcgtatcttttacggattatgtgttgcctaatttagcgctcaatgacggctctttggatgcgaattacttccagcaccgcccttatttggatcggtttaatttggacaggaaaatgcaccttgttggtttggccaatatccatgtggagcctttaagattttattctcaaaaaatcacagatattaaaaatcttaaaaagggttcagtgattgctgtgccaaatgatccggccaatcaaggtagggcgttgattttactccataaacaaggccttatcgccctcaaagacccaagcaatctatacgctacggagtttgatattgtcaaaaatccttacaatatcaaaatcaagcctttagaagccgcgttattgcctaaggttttaggggatgtggatggggctatcataacagggaattatgccttgcaagcaaaactcaccggagctttattttcagaagataaggactcgccttatgccaatctaatagccgctcgtgaggataacgcgcaagatgaagccataaaaacattgattgaagccttacaaagtgaaaagaccaggaaattcattttggatacctataagggggcgattatcccggctttt

SEQ ID NO: 123 - DNA, 1764 bp, Artificial Sequence
  Description of Artificial Sequence:  Synthetic Primer
atgaaaaatcttcgctataagcttttgctctttgtttttatagggttttgggggttactagccttaaatttatttattttaagcgttaaaaatcaagaatactatgaaaaattggctgaacgaaacatgactaaaaaggaatttctagtccctacaaggggaaatattacagacagaaatgatgagtttttggccactaatgaattggtgtttggcgtgtttttgcccagcggactgaaacaaaaagatcttttagaaaaaattgaaatcatccaaaagtttttccctaacttttctaaagaaacgcttttaaacaattaccaaaaagaaaattcgctttataaccataacctcattaaagtggttggcttcattccttatgccaccatgcaacctctttatgccaaactcatccaaactcaaggcatttttgcgcttcccttagacaagcgttactaccctaataacgctttagcttcgcatgttttaggctatgtgggggtggcaagcttgcaagatttaaaagacgatgaggagaatcaatacagccagattgtaggcaaaaccggcattgaaaaagaatacaacaagcttttacaaggcaaggtgggttataaaatcatgcgtgtcaatgcgctcaatcaagaattagccaccttagaagtagtgctgccaagcaccaacaaccacttgcaattgagtttagacaaacgcttgcaaaaagaagcggacaagctctttgaaaataaaaggggggctattttagtgatggatgcagaaaatggggaattgctcgttgcaggaagttaccctgaatacaatttgaacgattttgtaggcgggatcagtcaagacaaatggcaaaaacttcaagatgatatttataaccccttattaaaccgcttcgctaacgccttgtatccgccgggatctgtggttaaaatgggcgtgggcttgagctttttagaaaaccttcatatcacagaaaacaccaccatacccaccccgccttttattgaagtgggcaagcacaaattcagagactggaaaaaaacagggcatggcaattctaatttgtataaagccattagggagtccgtggatgtgtatttttataagtttgggcttgaaatctctatagaaaaactctctaaaaccttaagggaagtgggctttggggaaaaaacgggcgttgatttgccgaatgaatttgtggggattgtgccggataatttgtggaaactcaaacgcttcaatcaagactggcgcgttggggacacgctcattaccgctattgggcaaggctcttttttagccacgcccttgcaggttctagcctacacgggactcattgctacgggcaaactggcaacgcctcatttcgctatcaacaacaaacaaccgcttaaagatcccctaaatagctttcaaaaaaagaagctccaagccttgagagtgggcatgtatgaagtgtgtaaccataaagacggcaccgcttatcattccacaaggggttctaagattactttagcgtgtaaaaccggcaccgcacaagtcgtggaaatcgctcaaaacatcgtcaatcgcatgaaagaaaaggatatggaatatttccatcgatcccatgcgtggattaccgcatttttgccttatgaaaaacccaaatacgctatcactattttagtagaacatggggaaggggggtcaaaactagggggcctgttagtgaagatgagtaataaactctatgagcttggctatctt

SEQ ID NO: 124 - DNA, 618 bp, Artificial Sequence
  Description of Artificial Sequence:  Synthetic Primer
atgttcagcggtctaatccatcaaatagctaaagtgaaaagtttccacaacaatattttaaacatagagagtgatctcaatcccaagcttggcgatagcattgcgattaatggggcatgtttgaccgccatagaaagttcaaaaacgcattttagcgtggaattgagccaaaaaacccaaaacagcgtagcgttagaaaattacaaggatttagtccatattgagccagccctaaaagctgatgcgagtttggatgggcattttgtgcaagggcatattgacgctataggggtcattgaaaaaatcattcacaacgctaatcaagtggattttttcatcagcgcttctgaagaaacgcttttattgtgcgttgagcaaggctctattgcagttgatggggtgagtttgactttaagcaaggtagaagaaaaggggttttggctaacgattatcccttacactttagaaaacaccctttttaaggcttataaactcaaacggcgcgtgaatattgaaacggacatgttagtccgcagcgttgcgtctattttgaaaaaaacaaaagggtttgaaaaaaatttctcttggaatgaggctgacgctttgactttagggtat

SEQ ID NO: 125 - DNA, 120 bp, Artificial Sequence
  Description of Artificial Sequence:  Synthetic Primer
aaaaagagcgaacgctttaaaattgaacttaagccatttaaaaaaaggccaaatcgtggtgcgcatagacgagcgttatttcaggcctaccgaagtggatttgcttttaggcgatcccac

SEQ ID NO: 126 - DNA, 51 bp, Artificial Sequence
  Description of Artificial Sequence:  Synthetic Primer
tggttcgccaaaaaagattttagcgcttggagcgcaacaaaaagggcattt

SEQ ID NO: 127 - DNA, 204 bp, Artificial Sequence
  Description of Artificial Sequence:  Synthetic Primer
aacctgcaaacccaccttaaaaggctcaaaagaagtgagtttgtgggccaaaaaggaattagagggcatggggaggttttctttaaaagaaattttaatgctcagccttaccttattggctttactgggttggatttttggcaaacctttaggcttgcatgcgagtgcgacggctttgattgtcatggttttaatggcgttttg

SEQ ID NO: 128 - DNA, 87 bp, Artificial Sequence
  Description of Artificial Sequence:  Synthetic Primer
acacaagccattattttgaaaaaaaaccaggcttgggggagagggtggattatgcggggcgttgcttctataataaattccagagag

SEQ ID NO: 129 - DNA, 144 bp, Artificial Sequence
  Description of Artificial Sequence:  Synthetic Primer
gccatgtggatattactaaaaacaagcaagactcgcaactcaaaaaagattgtttggaatttatccaaaggtttaatgtcccaaagcccattatcattaccgctctttataaccttaggggcattaagcccactaaaaaagaag

SEQ ID NO: 130 - DNA, 69 bp, Artificial Sequence
  Description of Artificial Sequence:  Synthetic Primer
aaaaagaagaaaagcaaaaattccaaaaattcgccctgggcttggaaatgtctttcaatgtgtggcgtt

SEQ ID NO: 131 - DNA, 93 bp, Artificial Sequence
  Description of Artificial Sequence:  Synthetic Primer
aaaaagcttataaaaagcctagcattaaagaaagacaccgccatcgttatgaaatcaaccccaaataccgccaagagtgggaaaataagggct

SEQ ID NO: 132 - DNA, 72 bp, Artificial Sequence
  Description of Artificial Sequence:  Synthetic Primer
aggggcgctacacccccacgcaaaaaaacattatttttgaaaaaaccgagcgttttatcacgcccaaactcc

SEQ ID NO: 133 - DNA, 54 bp, Artificial Sequence
  Description of Artificial Sequence:  Synthetic Primer
tcggctcaaccaccatcgctaaaacggagcttaggggggttgaaagccatggca

SEQ ID NO: 134 - DNA, 42 bp, Artificial Sequence
  Description of Artificial Sequence:  Synthetic Primer
aaacatgatcacggcttttgggtgcggcattcaagagagttt

SEQ ID NO: 135 - DNA, 60 bp, Artificial Sequence
  Description of Artificial Sequence:  Synthetic Primer
gccaaaaatacggctttaaaatcccttgctttgggcatacgggcgatggcaatgtgcatg

SEQ ID NO: 136 - DNA, 189 bp, Artificial Sequence
  Description of Artificial Sequence:  Synthetic Primer
cgctttgaaagacaaaacctatctctacgctatggatctattggattacaacaactatttatccatagaaaaccccattatcaaaacaagagcaatgggaacttatgcggatttgattatcatcacaggctcattagagcaagtcaatgggtattacaacattctaaaagcgctcaacaaacgcaacgc

SEQ ID NO: 137 - DNA, 147 bp, Artificial Sequence
  Description of Artificial Sequence:  Synthetic Primer
tcgtcagtttcatcaaaaaagccagccaaaaattccctaactcgctttttatcatcacaggggatcattttgacaggagctatgaatacgctaaaaacgatttgtatatcattaaatccgtgccgcttattttatatgcccctactt

SEQ ID NO: 138 - DNA, 102 bp, Artificial Sequence
  Description of Artificial Sequence:  Synthetic Primer
aagtggaacatttctaccccaaaacccccacccaagaatggcgcgatagggtgggggattatttcacttttgagcaagactatcttaataattttgggaatc

SEQ ID NO: 139 - DNA, 81 bp, Artificial Sequence
  Description of Artificial Sequence:  Synthetic Primer
aaaacgcgatggataccaacagagaagtggcgcaattccactatggaggcggcacgccgacctttttttcgcccattcaat

SEQ ID NO: 140 - DNA, 228 bp, Artificial Sequence
  Description of Artificial Sequence:  Synthetic Primer
aaaaactttcgtgctcatgacttttttgagcgcagggattgtcaatatttttattccgtctggcggagggcaatgggcgattcaagctcctatcatgcttccggctgggcaaagcttaggggtggatccgggagtggtttctatggctatcgcttggggagatgcttggacgaatatgatacagcctttttgggctttgcccgctttagccattgcgggtttgggcgc

SEQ ID NO: 141 - DNA, 72 bp, Artificial Sequence
  Description of Artificial Sequence:  Synthetic Primer
aaggcccggttaaaacgctttcagattattccacttatatcagccgaaaaagcaatgttacaggcgatgcgt

SEQ ID NO: 142 - DNA, 51 bp, Artificial Sequence
  Description of Artificial Sequence:  Synthetic Primer
cgggcaccatttagacgggagccttggaggttgggggggtgctgtaattta

SEQ ID NO: 143 - DNA, 69 bp, Artificial Sequence
  Description of Artificial Sequence:  Synthetic Primer
tttacaaggcataaacaaacaagccgctcaaaaagaagcaaaagccttagcgttaaaaatggggttaga

SEQ ID NO: 144 - DNA, 78 bp, Artificial Sequence
  Description of Artificial Sequence:  Synthetic Primer
ttcttcagttacattcaatatgaaaggcgctctagtggctatcaccgagcttggcccttctttagggagcgttttgac

SEQ ID NO: 145 - DNA, 63 bp, Artificial Sequence
  Description of Artificial Sequence:  Synthetic Primer
agggatttacttgcaataccgcagcgttttgcgcgaaaacaggcttttaaaaaaccatctctc

SEQ ID NO: 146 - DNA, 33 bp, Artificial Sequence
  Description of Artificial Sequence:  Synthetic Primer
aaatcgcccaaaaaggcaacaaaaaagaggttt

SEQ ID NO: 147 - DNA, 39 bp, Artificial Sequence
  Description of Artificial Sequence:  Synthetic Primer
gcgcttgagcagcgtgatgaaagatttacccgtgggggt

SEQ ID NO: 148 - DNA, 303 bp, Artificial Sequence
  Description of Artificial Sequence:  Synthetic Primer
cccatatcttgcaaagcccctaaattcgtggtgagtttgtgcaattctggcatgccgttagacttaggcccttggaaaggcaagaccgccacaaagtccctttctaattctttatttttaaagcgttctaaaaactcgctttgggttttaaaaacaatcgctctagccttaactttcctatgctcatctttaatggctgagattttaatcacggccctccctaaattaccctttaaaattttaagccccccattagcggcaaaaggatcactaacagggcgtaaaatatccgtattcaggcta

SEQ ID NO: 149 - DNA, 45 bp, Artificial Sequence
  Description of Artificial Sequence:  Synthetic Primer
aagagcatcacatcacgccaagctataaaaccgatattgagagcg

SEQ ID NO: 150 - DNA, 114 bp, Artificial Sequence
  Description of Artificial Sequence:  Synthetic Primer
tttaaaacccttgttgagctttttaaaagccaaataccaggtgcctttagaaaacattcgcatccaagacactcaaattttagcgtttttaaaaaatccggaaaaagtggggtt

SEQ ID NO: 151 - DNA, 93 bp, Artificial Sequence
  Description of Artificial Sequence:  Synthetic Primer
aacgctattatgaagccaaagaaaccgcaatatttaaaaaattccctaaattcatccaactttatgataacgccacttctaaaatccaagcct

SEQ ID NO: 152 - DNA, 48 bp, Artificial Sequence
  Description of Artificial Sequence:  Synthetic Primer
ataaaagccctaaaaccaagcttgtttgagcgtctaaattctctaaac

SEQ ID NO: 153 - DNA, 186 bp, Artificial Sequence
  Description of Artificial Sequence:  Synthetic Primer
gcgatgctgttttttagattcgttacggtttctcccacatacgcgcagccggctccccaagtgttagaagtaaccgtgccagatggcgtgccacggagattgccgtcgctacccttttcatggcatactcctaaagagtctttcacgaacgctgcagggattctttcaaagtccttcaccactgct

SEQ ID NO: 154 - DNA, 105 bp, Artificial Sequence
  Description of Artificial Sequence:  Synthetic Primer
gggctttttcaaaatctaacgccccactcaaagacaccgcgctcacttcgccgagcgaatgccctaaagcaaaaacgggttttaaccccccatttacttgcttgt

SEQ ID NO: 155 - DNA, 111 bp, Artificial Sequence
  Description of Artificial Sequence:  Synthetic Primer
tttgttggaccccaagaggtgccaccgatcgcaacgcccaagaaaaacccaaaatgcaagttctcacgattgaaaatagccgggttaaacaacacatctgtgccagcccca

SEQ ID NO: 156 - DNA, 291 bp, Artificial Sequence
  Description of Artificial Sequence:  Synthetic Primer
ataagagcgtttttcaaaggtgtaaatcttgccaatttcattgactatgggcgtgatagccgcatttttgggagcgatgatttcataagcggtgttagtggtagtggtgaatttgcatgcaaaaaaacgcccgtcttcggttatttcgccattgacttgaaaatccccttcgctaatggctgtttggtggttttgagtatccaacctttcaaaaggccttcgcatcaaatagccgtccgtaaaacccctgtttttaagcgtgttcaattcgctggcataaaaactcggctt

SEQ ID NO: 157 - DNA, 123 bp, Artificial Sequence
  Description of Artificial Sequence:  Synthetic Primer
aagttctttagcaatcacttgagaagaaaggtcgtttttatagatataagtttgcatgtcaatgcttttttggctcattctaataagtcccactctatgcaacagagcgtcaaagccatcttc

SEQ ID NO: 158 - DNA, 42 bp, Artificial Sequence
  Description of Artificial Sequence:  Synthetic Primer
tccgtaggggtgaaaaaatcgcctccaaactccacttccgca

SEQ ID NO: 159 - DNA, 198 bp, Artificial Sequence
  Description of Artificial Sequence:  Synthetic Primer
accctaacttgcaaaaaagtcgcttctaaaagggctttgatttgcgcattgatttcgctcacgctcaatacatccaccagctcccccttttatagcaaacgagtgagatcattgaaaagccctaaaaacatgataaaaaccaaaaaccccacccccgctagccacaacgcattttgtatgggtgttggcaaagtgata

SEQ ID NO: 160 - DNA, 189 bp, Artificial Sequence
  Description of Artificial Sequence:  Synthetic Primer
gcgtcaatgagtttgtctaatcctgtgccgctaggcatcgccgcggttacgcctacgattttttcatcttttttagctaattctaaaagggtgttagaatacgcttcagtgggcgataagattgcgcttttggattttttagacaagccggtatccaaatcaaaaggccccaccccatgccatttttca

SEQ ID NO: 161 - DNA, 255 bp, Artificial Sequence
  Description of Artificial Sequence:  Synthetic Primer
atctttttgagcaacacctctctttgcatggggcggacaaattgcaacacaaaaagcaatgaaaacgcgctcgcttctttaaactcaacctctaaaaaatccatgcattcaaaacgggcattgttaaaatcttttaatttttcttgcgcttttttgagcatgggcatggaattatcaatccctacaagctcaatctcttgttggatttgtcggttaagcgcgataaaaaagttcccggtagaacagcccaaatca

SEQ ID NO: 162 - DNA, 249 bp, Artificial Sequence
  Description of Artificial Sequence:  Synthetic Primer
agggattttcaagtccttaaacatcgcttgcaccctttctttttcatttttacgcaacaagccatgatccacaaaaacagcgatcaaattatccttaatggctctgtgcaacagcgtagcgaccaccgtagaatccacgcccccactcaccgcgcacaaaaccttagcgttagcgattttttctttcaatcgtgcgatttctctttgagcgaaatgctgcatcccccaagttttttcacagccgcaaac

SEQ ID NO: 163 - DNA, 117 bp, Artificial Sequence
  Description of Artificial Sequence:  Synthetic Primer
attatccacatgaggggcgaccactctcatcacatgccctctttttttcagcgcttcaaaaaaacgaaacgctgtcatagaagtgccattactggtgtctttaaaactatccacgac

SEQ ID NO: 164 - DNA, 132 bp, Artificial Sequence
  Description of Artificial Sequence:  Synthetic Primer
atcattatcccggctgtgctcgccaatgaccatgcccacataaaccttcgtttgggggttgataaaaagcgtgcctctttcttggatattgaaaagggaaaaagcggtcgcttcgccattttccatgctgat

SEQ ID NO: 165 - DNA, 75 bp, Artificial Sequence
  Description of Artificial Sequence:  Synthetic Primer
aaaaaccgcccttctaaaaacccgctcgcgcaaaacgccgtagtgagcgcgttagctccgggcaaaacatcgtat

SEQ ID NO: 166 - DNA, 66 bp, Artificial Sequence
  Description of Artificial Sequence:  Synthetic Primer
aaaccctctagcgtttggatctataaaccaataataaggggcaaaaatattcaaaccataccttcc

SEQ ID NO: 167 - DNA, 147 bp, Artificial Sequence; identical to SEQ ID NO: 137
  Description of Artificial Sequence:  Synthetic Primer

SEQ ID NO: 168 - DNA, 129 bp, Artificial Sequence
  Description of Artificial Sequence:  Synthetic Primer
cgcgctcgctcgcgctctcttttaggattttttcttttgaaagcgagttgcaaaacaccgcataagagcctaaattttcatctttccaattcaaaacagggtaagtggcgcataaaatctttttggaaa

SEQ ID NO: 169 - DNA, 261 bp, Artificial Sequence
  Description of Artificial Sequence:  Synthetic Primer
gtttcagaaatcttatccacgctcgttagcccatcaaaactccctgaggaaccaaaggctaaattgatgcgttggggggcatcagcgccatttttagggtcaaattgcaaaagaggcgggttcatgcctgcaagcgatccgtcgttattaaaatgcaaacggcctccttcaaacacattaggcctagccgctgacccccctactaattccccaggctcaggcacgatcaccctaaaattccattccgctcccccactccta

SEQ ID NO: 170 - DNA, 108 bp, Artificial Sequence
  Description of Artificial Sequence:  Synthetic Primer
ctgcctaaccttaacaaaatcagttcatcatctttcactaaatacacaagcaaaacatcaggcttaatgtggcattccctaaaaggtttccactttccctttaaggca

SEQ ID NO: 171 - DNA, 78 bp, Artificial Sequence
  Description of Artificial Sequence:  Synthetic Primer
tcaaggtttagggagcgtgttgccgccctctttacaaaacgcgctcaaagaaaacgatttaggcactcttttatcgcc

SEQ ID NO: 172 - DNA, 123 bp, Artificial Sequence
  Description of Artificial Sequence:  Synthetic Primer
aatattcattggccacacgcaccaaatcgctcacttttaaatccaaaaattgtcgctggtaatccgtcaagccttgaatatcgttttgcactaaatagtccgcaaaaagccccgcaacatcgc

SEQ ID NO: 173 - DNA, 303 bp, Artificial Sequence; identical to SEQ ID NO: 148
  Description of Artificial Sequence:  Synthetic Primer

SEQ ID NO: 174 - DNA, 81 bp, Artificial Sequence
  Description of Artificial Sequence:  Synthetic Primer
gaatctttagtcctaaaacctattttaggcaaacggcgttgtaagggttgttgccctccttcaaagcctcttttagcctta

SEQ ID NO: 175 - DNA, 84 bp, Artificial Sequence
  Description of Artificial Sequence:  Synthetic Primer
ggttcaaatgagcgatcgcataaggagcgattaagtattcaaacccatagaattgcttcaagagattttgatatttgtcctctt

SEQ ID NO: 176 - DNA, 276 bp, Artificial Sequence
  Description of Artificial Sequence:  Synthetic Primer
ctagggggcaataaatctttcacgctatactcccaccacacatcacagccttttttctcaaaaagattggccacatgctctaaaacttcgctttcaaaacaaggcttattcgtgcgtttgtctatgaaaaaggccagtggcacgccccattttctttgccggctcaagcaccaatcagggcggttttctatcatggtttttaggcggtttttcccgctgcttggcacaaattccaccttttcaatcgcatctaaagccacttctcttaaggttttt

SEQ ID NO: 177 - DNA, 99 bp, Artificial Sequence
  Description of Artificial Sequence:  Synthetic Primer
gcgttcgtgcttaagccttgtaaaaaagcctgctcttggagttttaagttttccttggctaattccacgctagaaagcaagcttttgtattctttcaaa

SEQ ID NO: 178 - DNA, 186 bp, Artificial Sequence
  Description of Artificial Sequence:  Synthetic Primer
gagagcatctcttctctgatcctgtcaaaaataatgatcgtatcattaatggaatacccaatcaaggtgagcaaggccgcaatcacttccaaattcatatcaatcttaaaaacaatcaccgagcttgccactaaaatcacatcatgcacaagcgcaatgacgctcgctaaagcaaaacgccattca

SEQ ID NO: 179 - protein, 634 aa, Artificial Sequence
  Description of Artificial Sequence:  Synthetic Peptide
MVKNTGELKKLSDTYENLSNLLTNFNNLNQAVTNASSPSEINATIDNLKANTQGLIGEKTNSPAYQAVYLALNAAVGLWNVIAYNVQCGPGKSGDQSVIFDGQPGHDSRSINCNLTGYNNGVSGPLSIDNFKTLNQAYQTIQQALKQDSGFPVLDSKGKQVTIKITTQTNGANKSETTTTTTTTNDAQTLLQEASKMISVLTTNCPWVNTAHNSNGGAPWNLNTTGNVCQVFATEFSAVTSMIKNAQEIVTQAQSLNNPQSNQNAPKDFNPYTSADRAFAQNMLNHAQAQAKMLELADQMKKDLNTIPKQFITNYLAACRNGGGTLPDAGVTSNTWGAGCAYVEETITALNNSLAHFGTQADQIKQSELLARTILDFRGSLKDLNNTYNSITTTASNTPNSPFLKNLISQSTNPNNPGGLQAVYQVNQSAYSQLLSATQELGHNPFRRVGLISSQTNNGAMNGIGVQIGYKQFFGEKRRWGLRYYGFFDYNHAYIKSSFFNSASDVFTYGVGTDVLYNFINDKATKNNKISFGVFGGIALAGTSWLNSQYVNLATFNNFYSAKMNVANFQFLFNLGLRMNLAKNKKKASDHVAQHGVELGVKIPTINTNYYSLLGTQLQYRRLYSVYLNYVFAY

SEQ ID NO: 180 - protein, 546 aa, Artificial Sequence
  Description of Artificial Sequence:  Synthetic Peptide
MAKEIKFSDSARNLLFEGVRQLHDAVKVTMGPRGRNVLIQKSYGAPSITKDGVSVAKEIELSCPVANMGAQLVKEVASKTADAAGDGTTTATVLAYSIFKEGLRNITAGANPIEVKRGMDKAAEAIINELKKASKKVGGKEEITQVATISANSDHNIGKLIADAMEKVGKDGVITVEEAKGIEDELDVVEGMQFDRGYLSPYFVTNAEKMTAQLDNAYILLTDKKISSMKDILPLLEKTMKEGKPLLIIAEDIEGEALTTLVVNKLRGVLNIAAVKAPGFGDRRKEMLKDIAILTGGQVISEELGLSLENAEVEFLGKAGRIVIDKDNTTIVDGKGHSHDVKDRVAQIKTQIASTTSDYDKEKLQERLAKLSGGVAVIKVGAASEVEMKEKKDRVDDALSATKAAVEEGIVIGGGAALIRAAQKVHLNLHDDEKVGYEIIMRAIKAPLAQIAINAGYDGGVVVNEVEKHEGHFGFNASNGKYVDMFKEGIIDPLKVERIALQNAVSVSSLLLTTEATVHEIKEEKAAPAMPDMGGMGGMGGMGGMM

SEQ ID NO: 181 - protein, 470 aa, Artificial Sequence
  Description of Artificial Sequence:  Synthetic Peptide
MKIKNILLSGGSGKRLWPLSRSLYPKQFLKLFDHKSLFELSFKRNASLVDETLIVCNEKHYFLALEEIKNEIKNKSVGFLLESLSKNTANAIALSALMSDKEDLLIVTPSDHLIKDLQAYENAIKKAIDLAQKGFLVTFGVSIDKPNTEFGYIESPNGLDVKRFIEKPSLDKAIEFQKSGGFYFNSGMFVFQAGVFLDELKKHAPTILKGCERAFESLENAYFFEKKIARLSEKSMQDLEDMSIDIALMQQSHKIKMVELNAKWSDLGNFNALFEEAANEPKENVSLNQTPVFAKESENNLVFSHKVSALLGVENLAVIDTKDALLIAHKDKAKDLKALVNEVETNNQELLQTHTKVYRPWGSYEVLHESGCYKVKILEVKPNARLSLQKHFHRSEHWVVISGMASVELDHQLFELQANESTYIPKNTLHRLANYGKIPLIIIEVQVGEYVGEDDIVRIDDDFNRQNQNA

SEQ ID NO: 182 - protein, 496 aa, Artificial Sequence
  Description of Artificial Sequence:  Synthetic Peptide
MAEWKTDTEEVKEVVKKCREFKRSLQEEKCSPFIKDLDSYALKIIVERRKIEHQLQEAIEKLRRAKKKRSSFWGSFVEGARDLLDMVREIIPPAKLGAEACDKVLNLMEDNIEKWEHNVRLLERMLEIYATQAKASAELVEGAWKSVKKSLDFYTDKHQEFIKRLNYASEAIDNEYNIAPPEILNESDFESPTIVYNPKKSVYDEHLKDLREDFSFSLYADLKNRINASSKLDRTTTSKEQEFEKNLEDLMPGFRGGTDTLSGDELEHMASFRGQEFEKNLEDLMPSSLGVHSYDESLNLAKKNCVKNCKKALGDFTEKIKESPNDLNAINEAFNHLETELERATENLSQKIAPILERYENDKRQKLGYGEFLEKEKEGFMVDEQNPYPEEVRFNELRLAEFESVFSAIVPLEDLDKPACAHHALKALEATLKNRDLGFDATELEQIAKGFIPKGYLWHFDANVLGNVALVREELLLGVKHTKGYLLWKQFLQTQN

SEQ ID NO: 183 - protein, 265 aa, Artificial Sequence
  Description of Artificial Sequence:  Synthetic Peptide
MNTYAQESKLRLKTKIGADGRCVIEDNFFTPPFKLMAPFYPKDDLAEIMLLAVSPGMMRGDAQDVQLNIGPNCKLRITSQSFEKIHNTEDGFASRDMHIVVGENAFLDFAPFPLIPFENAHFKGNTTISLRSSSQLLYSEIIVAGRVARNELFKFNRLHTKISILQDEKPIYYDNTILDPKTTDLNNMCMFDGYTHYLNLVLVNCPIELSGVRECIEESEGVDGAVSETASSHLCVKALAKGSEPLLHLREKIARLVTQTTTQKV

SEQ ID NO: 184 - protein, 569 aa, Artificial Sequence
  Description of Artificial Sequence:  Synthetic Peptide
MKKISRKEYVSMYGPTTGDKVRLGDTDLIAEVEHDYTIYGEELKFGGGKTLREGMSQSNNPSKEELDLIITNALIVDYTGIYKADIGIKDGKIAGIGKGGNKDMQDGVKNNLSVGPATEALAGEGLIVTAGGIDTHIHFISPQQIPTAFASGVTTMIGGGTGPADGTNATTITPGRRNLKWMLRAAEEYSMNLGFLAKGNASNDASLADQIEAGAIGFKIHEDWGTTPSAINHALDVADKYDVQVAIHTDTLNEAGCVEDTMAAIAGRTMHTFHTEGAGGGHAPDIIKVAGEHNILPASTNPTIPFTVNTEAEHMDMLMVCHHLDKSIKEDVQFADSRIRPQTIAAEDTLHDMGIFSITSSDSQAMGRVGEVITRTWQTADKNKKEFGRLKEEKGDNDNFRIKRYLSKYTINPAIAHGISEYVGSVEVGKVADLVLWSPAFFGVKPNMIIKGGFIALSQMGDANASIPTPQPVYYREMFAHHGKAKYDANITFVSQAAYDKGIKEELGLERQVLPVKNCRNITKKDMQFNDTTAHIEVNPETYHVFVDGKEVTSKPANKVSLAQLFSIF

SEQ ID NO: 185 - protein, 450 aa, Artificial Sequence
  Description of Artificial Sequence:  Synthetic Peptide
MSMEFDAVIIGGGVSGCATFYTLSEYSSLKRVAIVEKCSKLAQISSSAKANSQTIHDGSIETNYTPEKAKKVRLSAYKTRQYALNKGLQNEVIFETQKMAIGVGDEECEFMKKRYESFKEIFVGLEEFDKQKIKELEPNVILGANGIDRHENIIGHGYRKDWSTMNFAKLSENFVEEALKLKPNNQVFLNFKVKKIEKRNDTYAVISEDAEEVYAKFVLVNAGSYALPLAQSMGYGLDLGCLPVAGSFYFVPDLLRGKVYTVQNPKLPFAAVHGDPDAVIKGKTRIGPTALTMPKLERNKCWLKGISLELLKMDLNKDVFKIAFDLMSDKEIRNYVFKNMVFELPIIGKRKFLKDAQKIIPSLSLEDLEYAHGFGEVRPQVLDRTKRKLELGEKKICTHKGITFNMTPSPGATSCLQNALVDSQEIAAYLGESFELERFYKDLSPEELEN

SEQ ID NO: 186 - protein, 457 aa, Artificial Sequence
  Description of Artificial Sequence:  Synthetic Peptide
MRYFLVVFLFLFVGCTKKDFTLKDLSLPQEASSYLASSQNGSNNNQSIDPQALRENLKESYLKAWYSPWLDMKVKSNKKEVFWILKEMNKSTGYGEDLKPNAKAFNDALIKSMDIEHYPSVKIRAVVARDSDVRAVPTNKPYYLSQKGYPFDRYQNSLIFQGTPVLITHFNLDKTYAHIQSSFVYGWIKVSDLVYMHDKDIELLTHLKDYVMPIKDKIPLYTDYGDFYTNARVGELFALIPQSQKTPQKPQKKELKAYGFLRDAKGYAALQSVILEEKDFFVFPKAFNSENMAYFIDTMLGQKYGWGGLLGNRDCSAFTRDSFANFGILLPRNSYAQSRYANNYVDLSSMKAKEKEDYILKNATPFGTLIYLKGHIMLYLGAHNHQAIVAHSIWSVQTQKHFKTLSHKIGGVVITSLWLAEEHNGAFSKKKLLIDRVLGMSDLKDFVNKTSSPLNAN

SEQ ID NO: 187 - protein, 671 aa, Artificial Sequence
  Description of Artificial Sequence:  Synthetic Peptide
MKKKANEEKAQKRAKTEAKAEATQENKTKENNKAKESKIKESKIKEAKAKEPIPVKKLSFNEALEELFANSLSDCVSYESIIQISAKVPTLAQIKKIKELCQKYQKKLVSSSEYAKKLNAIDKIKKTEEKQKVLDEELEDGYDFLKEKDFLEWSRSDSPVRMYLREMGDIKLLSKDEEIELSKQIRLGEDIILDAICSVPYLIDFIYAYKDALINRERRVKELFRSFDDDDENSVSDSKKDEDNEEDEENEERKKVVSEKDKKRVEKVQESFKALDKAKKEWLKALEAPIDEREDELVRSLTLAYKRQTLKDRLYDLEPTSKLINELVKTMETTLKSGDGFEKELKRLEYKLPLFNDTLIANHKKILANITNMTKEDIIAQVPEATMVSVYMDLKKLFLTKEASEEGFDLAPNKLKEILEQIKRGKLISDRAKNKMAKSNLRLVVSIAKRFTSRGLPFLDLIQEGNIGLMKAVDKFEHEKGFKFSTYATWWIKQAISRAIADQARTIRIPIHMIDTINRINKVMRKHIQENGKEPDLEVVAEEVGLSLDKVKNVIKVTKEPISLETPVGNDDDGKFGDFVEDKNIVSSIDHIMREDLKAQIESVLDQLNEREKAVIRMRFGLLDDESDRTLEEIGKELNVTRERVRQIESSAIKKLRSPQYGRILRNYLRI

SEQ ID NO: 188 - protein, 231 aa, Artificial Sequence
  Description of Artificial Sequence:  Synthetic Peptide
MVQKIGILGAMREEITPILELFGVDFEEIPLGGNVFHKGVYHNKEIIVAYSKIGKVHSTLTTTSMILAFGVQKVLFSGVAGSLVKDLKINDLLVAIQLVQHDVDLSAFDHPLGFIPESAIFIETSESLNALAKEVANEQHIVLKEGVIASGDQFVHSKERKEFLVSEFKASAVEMEGASVAFVCQKFGVPCCVLRSISDNADEEANMSFDAFLEKSAQTSAKFLKSMVDEL

SEQ ID NO: 189 - protein, 514 aa, Artificial Sequence
  Description of Artificial Sequence:  Synthetic Peptide
MSFRINTNIAALTSHAVGVQNNRDLSSSLEKLSSGLRINKAADDSSGMAIADSLRSQSANLGQAIRNANDAIGMVQTADKAMDEQIKILDTIKTKAVQAAQDGQTLESRRALQSDIQRLLEELDNIANTTSFNGQQMLSGSFSNKEFQIGAYSNATVKASIGSTSSDKIGHVRMETSSFSGAGMLASAAAQNLTEVGLNFKQVNGVNDYKIETVRISTSAGTGIGALSEIINRFSNTLGVRASYNVMATGGTPVQSGTVRELTINGVEIGTVNDVHKNDADGRLTNAINSVKDRTGVEASLDIQGRINLHSIDGRAISVHAASASGQVFGGGNFAGISGTQHAVIGRLTLTRTDARDIIVSGVNFSHVGFHSAQGVAEYTVNLRAVRGIFDANVASAAGANANGAQAETNSQGIGAGVTSLKGAMIVMDMADSARTQLDKIRSDMGSVQMELVTTINNISVTQVNVKAAESQIRDVDFAEESANFSKYNILAQSGSFAMAQANAVQQNVLRLLQ

SEQ ID NO: 190 - protein, 299 aa, Artificial Sequence
  Description of Artificial Sequence:  Synthetic Peptide
MKKNILNLALVGALSTSFLMAKPAHNANNATHNTKKTTDSSAGVLATVDGRPITKSDFDMIKQRNPNFDFDKLKEKEKEALIDQAIRTALVENEAKTEKLDSTPEFKAMMEAVKKQALVEFWAKKQAEEVKKVQIPEKEMQDFYNANKDQLFVKQEAHARHILVKTEDEAKRIISEIDKQPKAKKEAKFIELANRDTIDPNSKNAQNGGDLGKFQKNQMAPDFSKAAFALTPGDYTKTPVKTEFGYHIIYLISKDSPVTYTYEQAKPTIKGMLQEKLFQERMNQRIEELRKHAKIVINK

SEQ ID NO: 191 - protein, 812 aa, Artificial Sequence
  Description of Artificial Sequence:  Synthetic Peptide
VRYIKFFKELNNKNVNLVGGKNASIGEMFQELVPIGIKVPDGFAITSEAYWYLLEQGGAKQKIIELLENVDATEIDVLKIRSKQIRELIFGTPFPSDLRDEIFQAYEILSQQYHMKEADVAVRSSATAEDLPDASFAGQQDTYLNIKGKTELIHYIKSCLASLFTDRAISYRASRGFDHLKVALSVGVQKMVRADKGSAGVMFSIDTETGFKDAVFITSAWGLGENVVGGTINPDEFYVFKPTLEQNKRPIIKRQLGNKTQKMVYAPRGSEHPTRNIKTTKKEWQSFSLSDEDVLILAKYAIEIEKHYSKEAKQYRPMDIEWAKDGESGEIFIVQARPETVQSQKSKEESQVFEKFKFKNPNEKKEIILQGRAIGSKIGSGKVRIINDLEHMNSFKEGEILVTDNTDPDWEPCMKKASAVITNRGGRTCHAAIVAREIGVPAIVGVSGATDSLYTGMEITVSCAEGEEGYVYAGIYEHEIERVELSNMQETQTKIYINIGNPEKAFGFSQLPNHGVGLARMEMIILNQIKAHPLALVDLHHKKSVKEKNEIENLMAGYANPKDFFVKKIAEGIGMISAAFYPKPVIVRTSDFKSNEYMRMLGGSSYEPNEENPMLGYRGASRYYSESYNEAFSWECEALALVREEMGLTNMKVMIPFLRTIEEGKKVLEILRKNNLESGKNGLEIYIMCELPVNVILADDFLSLFDGFSIGSNDLTQLTLGVDRDSELVSHVFDERNEAMLKMFKKAIEACKRHNKYCGICGQAPSDYPEVTEFLVKEGITSISLNPDSVIPTWNAVAKLEKELKEHGLTEH

SEQ ID NO: 192 - protein, 612 aa, Artificial Sequence
  Description of Artificial Sequence:  Synthetic Peptide
MSAELIAVYKDEQIIDLESAKVLGLSDGIKALNGTEPIYFDDSPLALEVIRHSCAHLLAQSLKALYPDAKFFVGPVVEEGFYYDFKTSSKISEEDLPKIEAKMKEFAKLKLAITKETLTREQALERFKGDELKHAVMSKIGGDAFGVYQQGEFEDLCKGPHLPNTRFLNHFKLTKLAGAYLGGDENNEMLIRIYGIAFATKEGLKDYLFQIEEAKKRDHRKLGVELGLFSFDDEIGAGLPLWLPKGARLRKRIEDLLSQALLLRGYEPVKGPEILKSDVWKISGHYDNYKENMYFTTIDEQEYGIKPMNCVGHIKVYQSALHSYRDLPLRFYEYGVVHRHEKSGVLHGLLRVREFTQDDAHIFCSFEQIQSEVSAILDFTHKIMQAFDFSYEMELSTRPAKSIGDDKVWEKATNALKEALKEHRIDYKIDEGGGAFYGPKIDIKITDALKRKWQCGTIQVDMNLPERFKLAFTNEYNHAEQPVMIHRAILGSFERFIAILSEHFGGNFPFFVAPTQIALIPINEEHHVFALKLKEALKKRDIFVEVLDKNDSLNKKVRLAEKQKIPMILVLGNEEVETEILSIRDREKQDQYKMPLKEFLNMVESKMQEVSF

SEQ ID NO: 193 - protein, 286 aa, Artificial Sequence
  Description of Artificial Sequence:  Synthetic Peptide
VKRILFFLVATTFLLRAETDSATINTTVDPNVMFSESSTGNVKKDRKRVLKSMVNLEKERVKNFNRYSETKMSKGDLSAFGAFFKGSLESCVDQKICYYEHKDGKVSFVVNDREKFYKHVLKDLGTELSLPLFNWLYKGSDFGALHEQFGDMYDGYIKYLISMVRISQKEKARKVDAIVLKKMEEQAEKDTKAAFQKRSSGELESHTDSPEFISSSKRTQNASNSDLNSMTNANALKETASKEPEASSKKEKKSKKKRRLSKKEKQQQALQQEFEKQISDSSKSEK

SEQ ID NO: 194 - protein, 196 aa, Artificial Sequence
  Description of Artificial Sequence:  Synthetic Peptide
MKEKNFWPLGIMSVLILGLGIVVFLVVFALKNSPKNDLVYFKGHNEVDLNFNAMLKTYENFKSNYRFLVGLKPLIKSPKTPILPYFSKGTHGDKKLQENLLNNALILEKSNTLYAQLQPLKPALDSPNIQVYLAFYPSPSQPRWLGTLDCKNACEPLKFDLLESDKMGRYKILFKFVFKNKEELILEQLAFFKQRI

SEQ ID NO: 195 - protein, 416 aa, Artificial Sequence
  Description of Artificial Sequence:  Synthetic Peptide
MAYFLEQTDSEIFELIFEEYKRQNEHLEMIASENYTFASVMEAMGSVLTNKYAEGYPNKRYYGGCEVVDKIESLAIERAKKLFNCQFANVQAHSGSQANNAVYHALLKPYDKILGMDLSCGGHLTHGAKVSLTGKHYQSFSYGVNLDGYIDYEEALKIAQSVKPEIIVCGFSAYPREIDFKKFREIADEVGALLLGDIAHVAGLVVTGEHAHPFPHCHVVSSTTHKTLRGPRGGIILTNDEEIAAKIDKAIFPGTQGGPLMHVIAAKAVGFKENLKPEFKAYAQLVKSNMQVLAKALKEKNHKLVSGGTSNHLLLMDFLDKPYSGKDADIALGNAGITVNKNTIPGETRSPFVTSGIRIGSAALSARGMGAKEFEIIGNKISDILNDINNVSLQLHVKEELKAMVNQFPVYHQPIF

SEQ ID NO: 196 - protein, 714 aa, Artificial Sequence
  Description of Artificial Sequence:  Synthetic Peptide
MKITYCDALIIGGGLAGLRASIACKQKGLNTIVLSLVPVRRSHSAAAQGGMQASLANAKKSEGDNEDLHFLDTVKGSDWGCDQQVARMFVTTAPKAIRELASWGVPWTRIKKGDRPAVVNGEHVTITERDDRHGYILSRDFGGTKKWRTCFTADATGHTMLYAVANEALHHKVDIQDRKDMLAFIHHDNKCYGAVVRDLITGEISAYVSKGTLLATGGYGRVYKHTTNAVICDGAGAASALETGVAKLGNMEAVQFHPTALVPSGILMTEGCRGDGGVLRDKFGRRFMPAYEPEKKELASRDVVSRRILEHIQKGYGAKSPYGDHVWLDIAILGRNHVEKNLRDVRDIAMTFAGIDPADSKEQTKDNMQGVPANEPEYGQAMAKQKGWIPIKPMQHYSMGGVRTNPKGETHLKGLFCAGEAACWDLHGFNRLGGNSVSEAVVAGMIIGDYFASHCLEAQIEINTQKVEAFIKESQDYMHFLLHNEGKEDVYEIRERMKEVMDEKVGVFREGKRLEEALKELQELYARSKNICVKNKVLHNNPELEDAYRTKKMLKLALCITQGALLRTESRGAHTRIDYPKRDDEKWLNRTLASWPSAEQDMPTIEYEELDVMKMEISPDFRGYGKKGNFIPHPKKEERDAEILKTILELEKLGKDRIEVQHALMPFELQEKYKARNMRLEDEEVRARGEHLYSFNVHELLDQHNANLKGEHHE

SEQ ID NO: 197 - protein, 385 aa, Artificial Sequence
  Description of Artificial Sequence:  Synthetic Peptide
MKDSFLFTSESVTEGHPDKMADQISDAVLDYIIERDQKAKVACETLVSNGFCMITGELKTSVYAPMQEIAREVVKKIGYTDALYGFDYRSAAVLNGVGEQSPDINQGVDREDGEIGAGDQGLMFGYACKETETLMPLPIHLAHQLTFALAQKRKDNTLPFLRPDGKSQVSVRYENNKPVSIDTIVISTQHSPEVSQKHLKEAVIEEIVYKVLSKEYLHDNIKFFVNPTGKFVIGGPQGDAGLTGRKIIVDTYGGSCPHGGGAFSGKDPSKVDRSAAYAARYVAKNLVASGVCDKATVQLAYAIGVIEPVSIYVNTHNTSKYSSAELEKCVKSVFKLTPKGIIESLDLLRPIYSLTSAYGHFGRELEEFTWEKTNKAEEIKAFFKR

SEQ ID NO: 198 - protein, 338 aa, Artificial Sequence
  Description of Artificial Sequence:  Synthetic Peptide
MMKIVIDLMGADHGVLPVIEGVSRALENKSFSTVLVGDKDKATPFISKELASKVEMIHTQDYIKMEEAATEAIKRKESSIYLGMDILKNGADALISAGHSGATMGLATLRLGRIKGVERPAICTLMPSVGKRPSVLLDAGANTDCKPEYLIDFALMGYEYAKSVLHYDSPKVGLLSNGEEDIKGNMLVKETHKMLKAYDFFYGNVEGSDIFKGVVDVVVCDGFMGNVVLKTTEGVASAIGSIFKDEIKSSFKSKMGALMLKNAFDILKQKTDYAEYGGAPLLGVNKSVIISHGKSNARAIECAIYQAISAVESQVCLRITQAFESLKPSVSQSDQQDA

SEQ ID NO: 199 - protein, 331 aa, Artificial Sequence
  Description of Artificial Sequence:  Synthetic Peptide
MEFYASLKSIAMHVPSERVKNAEFQQFLDTSDEWIEKRTGIKERRFANDEEKSSDLGVIAAKQAIERAHLTPKDIDLVVVATLSPDFLAMPSTACVLSAKLGIENKPAFDISAACTGFIYLLSVAKAYVESGMYENVLIVGAEKTSSVLDFKDRGTCILFGDGAGACVIGRTKRLKESILDVQISANGNFSNYLYTPRTLKPTPFNAKEEASEPFLCMKGNEVFKLAVKTLLKDVEMILEKNALKPEDVRLFIPHQANFRIIQAVREHLDFKDEQVVLTVHKYGNTSAASIPMAMGEAYEEGRLKKGDLMLLDAFGGGLTWGSALVYFGGS

SEQ ID NO: 200 - protein, 621 aa, Artificial Sequence
  Description of Artificial Sequence:  Synthetic Peptide
MSNQEYTFQTEINQLLDLMIHSLYSNKEIFLRELVSNASDALDKLNYLMLTDEKLKGLNTTPSIHLSFDSQKKTLTIKDNGIGMDKNDLIEHLGTIAKSGTKNFLSALSGDKKKDSALIGQFGVGFYSAFMVASKIVVQTKKVNSDQAYAWVSDGKGKFEISECVKDEQGTEITLFLKDEDSHFASRWEIDSVVKKYSEHIPFPIFLTYTDTKHEGEGDNQKEIKEEKCEQINQASALWKMNKSELKDKDYKEFYQSFAHDNSEPLSYIHNKVEGSLEYTTLFYIPSTAPFDMFRVDYKSGVKLYVKRVFITDDDKELLPSYLRFVKGVIDSEDLPLNVSREILQQNKILANIRSASVKKILSEIERLSKDEKNYHKFYEPFGKVLKEGLYGDFENKEKLLELLRFYSKDKEKLISLKEYKENLKENQKSIYYLLGENLDLLKASPLLEKYAQKGYDVLLLSDEIDAFVMPGVNEYDKTPFKDASHSESLKELGLEEIHDEVKDQFKDLMKAFEENLKDEIKGVELSSHLTSAVALIGDEQNAMMANWMRQMGQSVPESKKTLELNPNHAILQKLLKCEDKEQLSAFIWLLYDGAKLLEKGALKDAKSFNERLNSVLLKAL

SEQ ID NO: 201 - protein, 250 aa, Artificial Sequence
  Description of Artificial Sequence:  Synthetic Peptide
MLGNVKKTLFGVLCLGTLCLRGLMAEPDAKELVNLGIESAKKQDFAQAKTHFEKACELKNGFGCVFLGAFYEEGKGVGKDLKKAIQFYTKGCELNDGYGCNLLGNLYYNGQGVSKDAKKASQYYSKACDLNHAEGCMVLGSLHHYGVGTPKDLRKALDLYEKACDLKDSPGCINAGYIYSVTKNFKEAIVRYSKACELKDGRGCYNLGVMQYNAQGTAKDEKQAVENFKKGCKSSVKEACDALKELKIEL

SEQ ID NO: 202 - protein, 390 aa, Artificial Sequence
  Description of Artificial Sequence:  Synthetic Peptide
MRKKGMFEKIQKEWLSNIQKDLLSGFVVGLSVIPETAGFAIMVGLDVGVAFYTTFYMAFVLSLFGARKAMISAAAGSVALILVGVVKNYGLEYAGVATLMAGVLQILLGYLKIGNLLRFIPQSVMYGFVNALGILLLMEQFKFLQNQNLGVFVLLAIGILIIYLFPLITKKIPSNLICILIVSAIALIFDMHAPNLGSIEQGVSGFHFIIIPKNLDFKIMIELLPYALSLALVGTIESLLTAKTLDVILKDGVSDKNKETKAQGLGNIISGLLGGMTGCALVGQSIINAKSGAKTRLSTFFAGFSLMVLILVFNEYVVKIPIVAVVAVMVMISFTTFNFQSIINIKKIKLYDTLNMLLVVAVVLYTHNLAIGVVVGVLVNALWIKSKGIA

SEQ ID NO: 203 - protein, 483 aa, Artificial Sequence
  Description of Artificial Sequence:  Synthetic Peptide
MKKTILLSLMVSSLLAENDGVFMSVGYQIGEAVQQVKNTGEIQKVSNAYENLNNLLTRYNELKQTASNTNSSTAQAIDNLKESASRLKTTPNSANQAVSSALSSAVAMWQVIVSNLANNSLPTSEYNKINAISQSLQNTLENKNNDLKIENDYDHLLTQASTIINTLQSQCPGIDGGNGKPWGINASGNACNIFGNTFNAITSMIDSAKKAAADARRTAPESPNQPSAFNNADFNKNLNQVSSVINDTISYLKGDNLATIYNTLQKTPDSKGFQSLVSRSSYSYSLNETQYSEFQTTTKEFGHNPFRSVGLINSQSNNGAMNGVGVQLGYKQFFGKNKFFGIRYYAFFDYNHAYIKSNFFNSASNVFTYGAGSDLLLNFINGGSDKNRKVSFGIFGGIALAGTTWLNSQFMNLKTTNSAYSAKINNTNFQFLFNTGLRLQGIHHGVELGVKIPTINTNYYSFMGAKLAYRRLYSVYFNYVLAY

SEQ ID NO: 204 - protein, 355 aa, Artificial Sequence
  Description of Artificial Sequence:  Synthetic Peptide
MGVKFLKILVCGLFFWSLNAHLWGKQDNSFLGVAEKAYKSGNYSKATSYFKKACNDGVSEGCTQLGIIYENGQGTRIDYKKALEYYKTACQADDREGCFGLGGLYDEGLGTTQNYQEAIDAYAKACVLKHPESCYNLGIIYDRKIKGNADQAVTYYQKSCNFDMAKGCYVLGVAYEKGFLEVKQSNHKAVIYYLKACRLDDGQACRALGSLFENGDAGLDEDFEVAFDYLQKACGLNNSGGCASLGSMYMLGRYVKKDPQKAFNFFKQACDMGSAVSCSRMGFMYSQGDAVPKDLRKALDNYERGCDMGDEVGCFALAGMYYNMKDKENAIMIYDKGCKLGMKQACENLTKLRGY

SEQ ID NO: 205 - protein, 449 aa, Artificial Sequence
  Description of Artificial Sequence:  Synthetic Peptide
MELETHLSKYFTLAFTHKSMSLEMREKLAINSNATLKEFLQTIKNHCPNIKECMVLSTCNRFEIYASLKHGANTNEQKNALLKILAQNKKMSVSDLEKCVLMNTDESAVHHVFSVCSSLDSLVVGETQITGQMKNAYKFAFEEKFCSKDLTRLLHFAFKCAAKVRNLTGISKQGVSISSVAVKEALNIFEKERIKDKKALVIGLGEMAQLVIKHLLNKQFEALILGRNAAKFEDFIKELEEPKKVSFQNIENLNAYINEYELLFCATSSPHFIVQNRMLKETIFRRFWFDLAVPRNIEKPVLDNIFLYSVDDLEPMVRENVENRQESRMRAYEIVGLATMEFYQWIQSLEVEPVIKDLRELARISAQKELQKALKKRYVPKEYENNIEKILHNAFNTFLHNPTIALKKNAQKEESDVLVGAIKNLFNLDKSNANHAQNLNLYKCEYYEE

SEQ ID NO: 206 - protein, 348 aa, Artificial Sequence
  Description of Artificial Sequence:  Synthetic Peptide
MFIVAVLMLAFLIFVHELGHFTIARICGVKVEVFSIGFGKKLCFFKLFGTQFALSLIPLGGYVKLKGMDKEENGMNETTDDSYAQKSPFQKLWILFGGAFFNFLFAILVYFFLALGGEKVLLPVIGDLDKNALEAGLLKGDKILSINHKKIASFREIRSVVARARGELVLEIERNHQVLEKRLTPKIVAVISDSNDPNEMIRYKAIGIKPDMQKMGVVSYSLFQAFEKALSRFKEGVVLIVDSLRRLIMGSSSVKELSGVVGIVGALSHANSLSMLLLFGAFLSINLGILNLLPIPALDGAQMLGVVFKNIFHITLPTPIQNALWLAGVGFLVFIMFLGLFNDLTRLL

SEQ ID NO: 207 - protein, 378 aa, Artificial Sequence
  Description of Artificial Sequence:  Synthetic Peptide
MLLKNASFYDDEVLKRADIRLKDSLITEIKENLSPINNEEVIECRDLFVLPSFIDLSVTGLEGYENLKQKAFKGGVGLLNVFNCDQSGIKNIMAIKNNQLADIATLKNKGGEILIAPSDAFLELISHYAKSYNLPLLISLENSFEALNSGELAYELGQNFVENAFENTRLVRFMEVSRALQIPVLLDKVNSITTLKLIKAFNDLGAKLQAQTPLSHLVLDESVYEDYEPRFKIAPPLRDKESQNALKEALKNNEIAMLTSLHASKNSNAQLFEESAFGCESIEDAFSVAYTFLVQKKVISFQQLIKVMAINQAKFLKLNAGEVKENQLANLMIVDLNAQTRVSNQNSPFYGLELYGEVQRMILKGQTTFIKENACKKS

SEQ ID NO: 208 - protein, 340 aa, Artificial Sequence
  Description of Artificial Sequence:  Synthetic Peptide
LKIAIVRLSALGDIIVSAVFLAVIKECLPNAQIEWFVDERFSAILEHSPYIDKLHPIALKSALKTLNPLKIFKLFKSLRAYEYDIIIDMQGLVKSALITQMLKAPKKVGFDYASAREGLSMFFYSQKVSIAYDEPVLKRNFTLLSHALNLPQKEISKEISESLSSRAKAFSYQPSPKIDALNLNKNKPKILFILETSKINKTYPIERFKELALILENFQICLLWHADEYKATTLYHALKHQRDVLLLPKLTLNEVKALLFKMDLIIGGDTGITHLAWALQKPSITLYGNTPMERFKLESPINVSLTGNSNANYHKKDFSIQNIEPKKIKECVLNILKEKE

SEQ ID NO: 209 - protein, 2893 aa, Artificial Sequence
  Description of Artificial Sequence:  Synthetic Peptide
MKKFKKKPKSIKRSHQNQKTILKRPLWLMPLLISGFASGVYANNLWDLLNPKVGGEYVHWVKGSQYCAWWEFAGCLKNVWGANHKGYDAGNAANYLSSQNYQAISVGSGNETGTYSLSGFTNYVGGNLTINLGNSVVLDLSGSNSFTSYQGYNQGKDDVTFTVGAINLNGTLEVGNRVGSGAGTHTGTATLNLNANKVNINSNINAYKTSQVNIGNANSVITIGSVSLSGDVCSSLASVGIGANCSTSGPSYSFKGTTNATNTAFSNASGSFTFEENATFSGAKWNGGTYTFNKEFSATNNTAFSSGSFNFKGVSSFNGTSFSNASYTFDNQATFQNSSFNGGTFTFNNQTNPTNNAQHPQIQNSSFSGNATTLKGFVNFQQAFNNSNHQLTIQNASFNNATFNNTGKITIEKDASFNNTTFNTSVDTNNMSVTGGVTLSGKNDLKNGSTLDFGSSKITLAQGTTFNLTSLGSEKSVTILNSSGGITYSNLLNHAINGLTSALKTNESLSNPQSFAQGLWDIITYNGVTGQLLNENAATSKPTDSSPSKSSTNSTQVYQVGYKIGDTIYKLQETFSHNSIIIQALESGTYTPPPVINGSKFDLSASNYINADMPWYDHKYYIPKSQNFTESGTYYLPSVQIWGSYTNSFKQTFSANGSNLVIGYNSTWTDHNVSSSGTVSFGDTSGSALNGHCGPWPYYQCTGTTNGTYSAYHVYITANLRSGNRIGTGGAANLIFNGVDSINIANATITQHNAGIYSSSMTFSTQSMDNSQNLNGLNSNGKLSVYGTTFTNEAKDGKFIFNAGQAVFENTNFNGGSYQFSGDSLNFSNNNQFNSGSFEISAKNASFNNANFNNSASFNFNNSNATTSFVGDFTNANSNLQIAGNAVFGNSTNGSQNTANFNNTGSVNISGNATFDNVVFNGPTNTSVKGQVTLNNITLKNLNAPLSFGDGTITFNAHSVINIAESITNGNPITLVSSSKEIEYNNAFSKNLWQLINYQGHGASSEKLVSSAGNGVYDVVYSFNNQTYNFQEVFSQNSISIRRLGVNMVFDYVDMEKSDHLYYQNALGFMTYMPNSYNNNLGNANNTIYYYDKSIDFYASGKTLFTKAEFSQTFTGQNSAIVFGAKSIWTSLSDAPQSNTIIRFGDNKGAGSNDASGHCWNLQCIGFITGHYEAQKIYITGSIESGNRISSGGGASLNFNGLQGILLTNATLYNRAAGTQSSSMNFISNSANIQAQNSYFIDDTAQNGGNPNFSFNALNLDFSNSSFRGYVGKTQSVFKFNAKNAISFTNSTNLSSGLYQMQAKSVLFDNSNLSVSVGTSSIKANAINLSQNASINASNHSTLELQGDLNVNDTSSLNLNQSTINVSNNATINDYASLIASNGSHLNFNGAVNFNSANITTSLNNSSIVFKGAVSLGGQFNLSNNSSLDFQGSSAITSNTAFNFYDNAFSQSPITFHQALDIKAPLSLGGNLLNPNNSSVLDLKNSQLVFGDQGSLNIANIDLLSDLNDNKNRVYNIIQADMNSNWYERISFFGMHINDGIYDAKNQTYSFTNPLNNALKITESFKDNQLSVTLSQIPGIKNTLYNIGSEIFNYQKVYNNANGVYSYSDDAQGVFYLTSNVKGYYNPNQSYQASGSNNTTKNNNLTSESSIISQTYNAQGNPISALHIYNKGYNFNNIKALGQMALKLYPEIKKVLGNDFSPSSLNALNSNALNQLTKLITPNDWKNINELIDNANNSVVQNFNNGTLIVGATQIGQTDTNSAVVFGGLGYQTPCDYTDIVCQKFRGTYLGQLLESSSADLGYIDTTFNAKEIYLTGTLGSGNAWGTGGSASVTFNSQTSLILNQANIVSSQTDGIFSMLGQEGINKVFNQAGLANILGEVAVQSINKAGGLGNLIVNTLGSNSVIGGYLTPEQKNQTLSQLLGQNNFDNLMNDSGLNTAIKDLIRQKLGFWTGLVGGLAGLGGIDLQNPEKLIGSMSINDLLSKKGLFNQITGFISANDIGQVISVMLQDIVKPSNALKNDVAALGKQMIGEFLGQDTLNSLESLLQNQQIKSVLDKVLAAKGLGPIYEQGLGDLIPNLGKKGLFAPYGLSQVWQKGDFSFNAQGNVFVQNSTFSNANGGTLSFNAGNSLIFAGNNHIAFTNHAGTLQLLSDQVSNINITTLNASNGLKINAANNNVSVSQGNLFVSASCAQQSDPTTANIANPCALSAQSTNGASSNNASNNAPIALSNNDESLMVAANDFNFSGNIYANGVVDFSKIKGSANIKNLYLYNNAQFQANNLTISNQAVLEKNASFVTNNLNIQGAFNNNATQKIEVLQNLVIASNASLSTGIYGLEVGGALNNSGAIHFNLENTQTPTPLIQAEGIINLNTTQTPFMNVNNSMANNTTYTLLKSSRYIDYNINPNSLQSYLNLYTLININGNHIEEKNGALTYLGQRVLLQDKGLLLSVALPNSNNASQNNILSLSVLYNQVKMSCGDKAMDFTPPTLQDYIVGIQGQSALNQIEAVGGNAIKWLSTLMMETKENPFFAPIYLKNHSLNEILGVTKDLQNTASLISNPNFRDNATNLLELASYTQQTSRLTKLSDFRSREGESDFSLLELKNKRFSDPNPEVFVKYSQLSKHPNNLWVQGVGGASFISGGNGTLYGLNAGYDRLVKNVILGGYVAYGYSDFNGNIMHSLGNNVDVGMYARAFLKRNEFTLSANETYGGNATSINSSNSLLSVLNQRYNYNTWTTSVNGNYGYDFMFKQKSVVLKPQVGLSYHFIGLSGMKGNDAAYKQFLMHSNPSNESVLTLNMGLESRKYFGKNSYYFVTARLGRDLLIKSKGSNTVRFVGENTLLYRKGEVFNTFASVITGGEMHLWRLVYVNAGVGLKMGLQYQDINITGNVGMRVAF

SEQ ID NO: 210 - protein, 290 aa, Artificial Sequence
  Description of Artificial Sequence:  Synthetic Peptide
MFEKITLAHKDLFSRFLSAQKIVLSDVSFTNCFLWQHARLIQVAVIRDCLVIQTTYENQKPFYFYPIGKNAFECVKELLKLEKNLRFHSLTLEQKDDLKDNFVGVFDFTYNRDRSDYVYSIEELIALKGKKYHKKKNHLNQFLTNHANFVYEKISPQNKKEVLEASQAWFLESQTDDIGLINENKGIQSVLENYESLDVKGGLIRVNGEIASFSFGEVLNEESALIHIEKARTDIAGAYQIINQQLLLNEFSHLTYANREEDLGLEGLRRSKMSYNPVFLIDKYEAVAKN

SEQ ID NO: 211 - protein, 828 aa, Artificial Sequence
  Description of Artificial Sequence:  Synthetic Peptide
MRVTFGSKYNQMNNYQNALQNKINDANTQIASGLKIRYGYQNSDINNQNLKFQYEENTLDQGIDVAQNAYTSTLNTDKALQEFSKTMEAFKTKLIQSANDVHSETSRAAIANDLERLKEHMINVANTSIGGEFLFGGSKVDRPPIDSNGKYHGNGEDLNVLISSDNLVPYNISGQDLFLGTDKDKHKLITTNIKLFNQNKLHPDVMDALEHSSLPEEVFIKPSDTLRELIGDNDKDPTNDPKEFFYLQGVRPDGSSFKEKFALDKAYQNQESASKVSDLLDKIAHAYGNTSQNKVVDVSLNNWGQIEIKNLTPGSENLDFHLISSDGDFDDLDALRSSGKRVTEYIKSAFVTDRSLSQVKAVPNMYNPKVLEVPSVFVTKDNVLANKNTKLSEIFGDSVETLKINASRLDETSAIKIPNLPVYLDIPILLDVKNSTIKDLKDAIKKRFNNEVDVEIETNGRLRIIDNSSKESPISLALSALDAKGLEVAGIPTNNASEYQKTYFNKEGAKLESNVAQTAQNGAANGSTKLSEAAKGSLENSVFNMKLNDVNGLFLEAQMNLDNNGAFLSLPNGIKIPLYDPTSADIQASKPNEVTYRQLMDAMSIALNYSNTDPAIYQQISDNPTSKESKERFIGLLKQAKDNLSVNLNEEGKVIIQDNMHSNTKMQFMLFDKDANDFSQNALHSDKPSLKLNANNALIIDKPSVNFFDQLENTITSVRKGIYRPDALGDTYSSDMRNLGIQNGITLIDHLSDHIEKMIAKNGAHGKAFENIIRRNEVLKTQVQSIRGETTGTDMAETYNKFSNLTNNYNAVLASTNKINNLSLTKYL

SEQ ID NO: 212 - protein, 538 aa, Artificial Sequence
  Description of Artificial Sequence:  Synthetic Peptide
MDRAKFIFVTGGVLSSLGKGISSSSIATLLQHCNYQVSILKIDPYINIDPGTMSPLEHGEVFVTSDGAETDLDIGHYERFLNRNLTRLNNFTTGQIFSSVIENERKGEYLGKTIQIVPHVTDEIKRRIKSAAKGLDFLIVEVGGTVGDMEGMFYLEAIRQLKLELGNEKVINVHVTLIPYIQTTNELKTKPTQHSVQELRRLGVTPQIILARSPKPLDKELKNKIALSCDVEQDSVIVATDTKSIYACPILFLQEGILTPIARRFNLNKLHPKMAAWNTLVEKIIAPKHKVKIGFVGKYLSLKESYKSLIEALIHAGAHLDTQVNIEWLDSENFNEKTDLEGVDAILVPGGFGERGIEGKICAIQRARLEKLPFLGICLGMQLAIVEFCRNVLGLKGANSTEFNQRCEYPVVYLIGDFMDQNHQKQVRTYNSPLGGTMRLGEYECEIMPNSLLEKAYKKPSIKERHRHRYEINPKYRQEWENKGLKVVGFGSNHLIEAIELEDHPFFVGVQFHPEFTSRLQSPNPIILDFIKSALSKS

SEQ ID NO: 213 - protein, 567 aa, Artificial Sequence
  Description of Artificial Sequence:  Synthetic Peptide
LDLKVLLQRIVDFFIKLNKKQKIALIAAGVLITALLVFLLLYPFKEKDYTQGGYGVLFEGLDSSDNALILQHLQQNQIPYKVSKDDTILIPKDKVYEERITLASQGIPKTSKVGFEIFDTKDFGATDFDQNIKLIRAIEGELSRTIESLNPILKANVHIAIPKDSVFVAKEVPPSASVMLKLKPDMKLSPTQILGIKNLIAAAVPKLTIENVKIVNENGESIGEGDILENSKELALEQLHYKQNFENILENKIVNILAPIVGGKNKVVARVNAEFDFSQKKSTKETFDPNNVVRSEQNLEEKKEGASKKQVGGVPGVVSNIGPVQGLKDNKEPEKYEKSQNTTNYEVGKTISEIKGEFGTLVRLNAAVVVDGKYKIALKDGVNTLEYEPLSDESLQKINALVKQAIGYNQNRGDDVAVSNFEFNPMAPVIDNATLSEKIMHKTQKILGSFTPLIKYILVFIVLFIFYKKVIVPFSERMLEVVPDEDKEVKSMFEEMDEEEDELNKLGDLRKKVEDQLGLNASFSEEEVRYEIILEKIRGTLKERPDEIAMLFKLLIKDEISSDGAKG

SEQ ID NO: 214 - protein, 448 aa, Artificial Sequence
  Description of Artificial Sequence:  Synthetic Peptide
MYVEKILQSLQKKYPYQKEFHQAVYEAITSLKPLLDSDKSYEKHAILERLIEPEREIFFRVCWLDDNNQIQVNRGCRVEFNSAIGPYKGGLRFHPSVNESVIKFLGFEQVLKNSLTTLAMGGAKGGSDFDPKGKSEHEIMRFCQAFMNELYRHIGATTDVPAGDIGVGEREIGYLFGQYKKLVNRFEGVLTGKGLTYGGSLCRKEATGYGCVYFAEEMLQERNSSLEGKVCSVSGSGNVAIYTIEKLLQIGAKPVTASDSNGMIYDKDGIDLELLKEIKEVRRGRIKEYALEKKSAEYTPTENYPKGGNAVWHVPCFAAFPSATENELSVLDAKTLLSNGCKCVAEGANMPSSNEAIGLFLQAKISYGIGKAANAGGVSVSGLEMAQNASMHPWSFEVVDAKLHHIMKEIYKNVSQTAKEFKDPTNFVLGANIAGFRKVASAMIAQGV

SEQ ID NO: 215 - protein, 803 aa, Artificial Sequence
  Description of Artificial Sequence:  Synthetic Peptide
MDDLQEIMEDFLIEAFEMNEQLDQDLVELEHNPEDLDLLNRIFRVAHTIKGSSSFLNLNILTHLTHNMEDVLNRARKGEIKITPDIMDVVLRSIDLMKTLLVTIRDTGSDTNNGKENEIEEAVKQLQAITSQNLESAKERTTEAPQKENKEETKEEAKEENKENKAKAPTAENTSSDNPLADEPDLDYANMSAEEVEAEIERLLNKRQEADKERRAQKKQEAKPKQEVTPTKETPKAPKTETKAKAKADTEENKAPSIGVEQTVRVDVRRLDHLMNLIGELVLGKNRLIRIYSDVEERYDGEKFLEELNQVVSSISAVTTDLQLAVMKTRMQPVGKVFNKFPRMVRDLSRELGKSIELIIEGEETELDKSIVEEIGDPLIHIIRNSCDHGIEPLEERRKLNKPETGKVQLSAYNEGNHIVIKISDDGKGLDPVMLKEKAIEKGVISERDAEGMSDREAFNLIFKPGFSTAKVVSNVSGRGVGMDVVKTNIEKLNGIIEIDSEVGVGTTQKLKIPLTLAIIQALLVGVQEEYYAIPLSSVLETVRISQDEIYTVDGKSVLRLRDEVLSLVRLSDIFKVDAILESNSDVYVVIIGLADQKIGVIVDYLIGQEEVVIKSLGYYLKNTRGIAGATVRGDGKITLIVDVGAMMDMAKSIKVNITTLMNESENTKSKNSPSDYIVLAIDDSSTDRAIIRKCLKPLGITLLEATNGLEGLEMLKNGDKIPDAILVDIEMPKMDGYTFASEVRKYNKFKNLPLIAVTSRVTKTDRMRGVESGMTEYITKPYSGEYLTTVVKRSIKLEGDQS

SEQ ID NO: 216 - protein, 429 aa, Artificial Sequence
  Description of Artificial Sequence:  Synthetic Peptide
VIELDINASDKSLSHRAVIFSLLAQKPCFVRNFLMGEDCLSSLEIAQNLGAKVENTAKNSFKITPPTTIKEPNKILNCNNSGTTMRLYSGLLSAQKGLFVLSGDNSLNARPMKRIIEPLKAFGAKILGREDNHFAPLVILGSPLKACHYESPIASAQVKSAFILSALQAQGASTYKESELSRNHTEIMLKSLGADIHNQDGVLKISPLEKPLEAFDFTIANDPSSAFFFALACAITPKSRLLLKNVLLNPTRIEAFEVLKKMGASIEYAIQSKDLEMIGDIYVEHAPLKAINIDQNIASLIDEIPALSIAMLFAKGKSMVKNAKDLRAKESDRIKAVVSNFKALGIECEEFEDGFYVEGLEDISPLKQRFSRIKPPLIKSFNDHRIAMSFAVLTLALPLEIDNLECANISFPQFKHLLNQFKKGSLNGN

SEQ ID NO: 217 - protein, 196 aa, Artificial Sequence
  Description of Artificial Sequence:  Synthetic Peptide
LDILDLNKAQAVQQNEQEVEDKERESKEPVVLEDLSALAWLELEEFSRLSGLPKERILELVNLGKIKSKISSNKLLIDASSGTNALIKKVENSLISMDMNGRSLEPVFVEKTINTILNLHDKVIGAKDETISAFKNENMFLKDALISMQEVYEEDKKTIDLLRDELNQAREEIEFMKRKYRLMWGKVADMSSVNKK

SEQ ID NO: 218 - protein, 508 aa, Artificial Sequence
  Description of Artificial Sequence:  Synthetic Peptide
MILVLDFGSQYTQLIARRLRERGIYTEIVPFFESIENIQKKAPKGLILSGGPASVYAKDAYKPSGKIFDLNVPILGICYGMQYLVDFFGGVVVGANEQEFGKAVLEITQNSVIFEGVKIKSLVWMSHMDKVIELPKGFTTLAKSPNSPHCAIENGKIFGLQFHPEVVQSEEGGKILENFALLVCGCEKTWGMQHFAQREIARLKEKIANAKVLCAVSGGVDSTVVATLLHRAIKDNLIAVFVDHGLLRKNEKERVQAMFKDLKIPLNTIDAKEVFLSKLKGVSEPELKRKIIGETFIEVFEKEAKKHHLKGKIEFLAQGTLYPDVIESVSVKGPSKVIKTHHNVGGLPEWMDFKLIEPLRELFKDEVRLLGKELGVSQDFLMRHPFPGPGLAVRILGEISESKIKRLQEADFIFIEELKKANLYDKVWQAFCVLLNVNSVGVMGDNRTYENAICLRAVNASDGMTASFSFLEHSFLEKVSNRITNEVSGINRVVYDITSKPPGTIEWE

SEQ ID NO: 219 - protein, 268 aa, Artificial Sequence
  Description of Artificial Sequence:  Synthetic Peptide
MKVNKGFKFRLYPTKEQQDKLQHCFFVYNQAYNIGLNELQEQYETNKDSPPKERKYKKSSELDNAIKQCLRARDLPFSAVIAQQARMNVERALKDAFKVKNRGFPKFKNSKSAKQSFSWNNQGFSIKESDDECFKTFTLMKMPLLMRMHRRLPPNFKVKQISISCSHRKYFVSFSVEYEQDITPIKNTKNGVGLDLNILDTACSCEINNHDKLTDFKQYQTDMKELLGIEIDEELDTKRLIPTYSKLYSLKKYSKKFKRLQRKQSRRC

SEQ ID NO: 220 - protein, 858 aa, Artificial Sequence
  Description of Artificial Sequence:  Synthetic Peptide
MLESALKYCKEKAIDLLVGFVPKTYSMAQECNILGLYDDAFIITKQENLVGIISLQGLSYSNLMQKDLEGYFDARQNVLNTISKDIQLRIVAKRRKEFINQSPNIDNIYAKAIITQFESKGIYKTEYFLVFETITSNVKSFFEKKKLEMTTSINEELEESSKEDKQENENSSNETHSNTSSKKDKKNKFKKKITFSTKSKRALLIQTIERVKNALKEFKPTLLNSKEVLNFYAEYINGKYIAFNPKLKRLSDSYIASNVHFKKDYFVIEFQNQNTFCACVGIKAYESEEISSLPISTLLHTQIELDLIFHIRSLGQFESLNFLKTKKKLTLSKIVKADIDNYIELVQANRLSMQECALNLVIRAKSKAKLDKSLKEILSLLNNAGLGSVTETIGLKPSYFSFFPNNANINPRMRHQTSQVIASLILFEKNNTGFRANSWGDMPLSVFKNLDHSPYLFNFHNQEVKHKGVLAHNVARVVGHTMIIGATGAGKTTLISYLMMSALKYSNIDILALDRLNGLYSFTKYFDGIYNQGENFHINPFSLEDSATNRAFLLHFYAQMAKVDSYDDHKDKVEDRTALLNAIDTMYRNYNDEVKQAKFSNQELPLPFDLKEFVNAIAKTNTDILDSSFEDYLKSSLFSSRMDSLDFKTRISTINTDSILHNDDDAGLLAYYVFHKMIDRALKINRGFLCFIDEFKSYAQNEMMNKKINEIITQARKANGVIVLALQDINQLSEVRNAQSFIKNMGQLILYPQRNIDTKDLNDKFGIRLSDTEKHFLENTAVNEYKVLLKNMNDGSSNIIDVSLSSLGNYLQIFSSNSSMVEHIDNLIKHYPKTWREVFVSNKHENFDDKKHLEKVLK

SEQ ID NO: 221 - protein, 599 aa, Artificial Sequence
  Description of Artificial Sequence:  Synthetic Peptide
MKNIRNIAVIAHVDHGKTTLVDGLLSQSGTFSEREKVDERVMDSNDLERERGITILSKNTAIYYKDTKINIIDTPGHADFGGEVERVLKMVDGVLLLVDAQEGVMPQTKFVVKKALSFGICPIVVVNKIDKPAAEPDRVVDEVFDLFVAMGASDKQLDFPVVYAAARDGYAMKSLDDEKKNLEPLFETILEHVPSPSGSVDEPLQMQIFTLDYDNYVGKIGIARVFNGSVKKNESVLLMKSDGSKENGRITKLIGFLGLARTEIENAYAGDIVAIAGFNAMDVGDSVVDPANPMPLDPMHLEEPTMSVYFAVNDSPLAGLEGKHVTANKLKDRLLKEMQTNIAMKCEEMGEGKFKVSGRGELQITILAENLRREGFEFSISRPEVIIKEENGVKCEPFEHLVIDTPQDFSGAIIERLGKRKAEMKAMNPMSDGYTRLEFEIPARGLIGYRSEFLTDTKGEGVMNHSFLEFRPFSGSVESRKNGALISMENGEATAFSLFNIQERGTLFINPQTKVYVGMVIGEHSRDNDLDVNPIKSKHLTNMRASGSDDAIKLTPPRTMVLERALEWIEEDEILEVTPLNLRIRKKILDPNMRKRAKK

SEQ ID NO: 222 - protein, 314 aa, Artificial Sequence
  Description of Artificial Sequence:  Synthetic Peptide
MKKIGLSLCLVLSLGFLKAHEVSAEEIADIFYKLNAKEPKMKINHTKGFCAKGVFLPNAQAKKDLDVPLLNEKEIPASVRYSLGGVAMDDKSKVRGMALKLENQNASWTMVMLNTEINFAKNPNEFAQFFEMRIPKNGKVDEARIKKLYEEVPSYRNFAAYTKTIGISSSVANTPYYSVHAFRFKDKKGKLLPARWKFVPKEGIKYLNPQELKQKDSNYLLSAFQQHLKTKPIEYQMYLVFANKNDATNDTTALWKGKHKELLVGTLKVEKYEGMGCNKDVYFPADLPKGVEAPTDPLFQIRNEVYGITFSRRQ

SEQ ID NO: 223 - protein, 452 aa, Artificial Sequence
  Description of Artificial Sequence:  Synthetic Peptide
MLRLLIGLLLMSFISLQSASWQEPLRVSIEFVDLPKKIIRFPAHDLQVGEFGFVVTKLSDYEIVNSEVVIIAVENGVATAKFRAFESMKQRHLPTPRMVARKGDLVYFRQFNNQAFLIAPNDELYEQIRATNTDINFISSDLLVTFLNGFDPKIANLRKACNVYSVGVIYIVTTNTLNILSCESFEILEKRELDTSGVTKTSTPFFSRVEGIDAGTLGKLFSGSQSKNYFAYYDALVKKEKRKEVRIKKREEKIDSREIKREIKQEAIKEPKKANQGTQNAPTLEEKNYQKAERKLDAKEERRYLRDERKKAKATKKAMEFEEREKEHDERDEQETEGRRKALEMDKGDKKEERVKPKENEREIKQEAIKEPSDGNNATQQGEKQNAPKENNAQKEENKPNSKEEKRRLKEEKKKAKAEQRAREFEQRAREHQERDEKELEERRKALEAGKK

SEQ ID NO: 224 - protein, 276 aa, Artificial Sequence
  Description of Artificial Sequence:  Synthetic Peptide
MFKDFYRTTLSFLKPLLLLLVLLLPFSLCIADEYISISDDWDEIVRNHKTYYFENGLDHFNQGQYQQAFKDFRLAQEYSIGLGSVYLAKMYLEGKGVKVDYKKAQFYAENAIKGYGSGLLGGALILGRMQAEGLGMKKDLKQALKTYRHVVRMFSNKSTNFANNFRLPNLAEFTSMLIGSRFIDLSGLSANPIKFGKKFGILVKKSTQIKDKTLLWEDIAEISSNITLLKQQMGEILYRIGIAYKEGLGTRKKKDRAKKFLQKSAEFGYEKAMEAL

SEQ ID NO: 225 - protein, 330 aa, Artificial Sequence
  Description of Artificial Sequence:  Synthetic Peptide
MTEDRLSAEDKKFLEVERALKEAALNPLRHATEELFGDFLKMENITEICYNGNKVVWVLKNNGEWQPFDVRDRKAFSLSRLMHFARCCASFKKKTIDNYENPILSSNLANGERVQIVLSPVTVNDETISISIRIPSKTTYPHSFFEEQGFYNLLDNKEQAISAIKDGIAIGKNVIVCGGTGSGKTTYIKSIMEFIPKEERIISIEDTEEIVFKHHKNYTQLFFGGNITSADCLKSCLRMRPDRIILGELRSSEAYDFYNVLCSGHKGTLTTLHAGSSEEAFIRLANMSSSNSAARNIKFESLIEGFKDLIDMIVHINHHKQCDEFYIKHR

SEQ ID NO: 226 - protein, 1927 aa, Artificial Sequence
  Description of Artificial Sequence:  Synthetic Peptide
  MOD_RES (907): x = any natural occuring amino acid
MNEENDKLETSKKAQQDSPQDLSNEEATEANHFENLLKESKESSDHHLDNPTETQTHFDGDKSEETQTQMDSEGNETSESSNGSLADKLFKKARKLVDNKKPFTQQKNLDEETQELNEEDDQENNEYQEETQTDLIDDETSKKTQQHSPQDLSNEEATEANHFENLLKESKESSDHHLDNPTETQTNFDGDKSEETQTQMDSEGNETSESSNGSLADKLFKKARKLVDNKKPFTQQKNLDEETQELNEEDDQENNEYQEETQTDLIDDETSKKTQQHSPQDLSNEEATEANHFENLLKESKESSDHHLDNPTETQTNFDGDKSEEITDDSNDQEIIKGSKKKYIIGGIVVAVLIVIILFSRSIFHYFMPLEDKSSRFSKDRNLYVNDEIQIRQEYNRLLKERNEKGNMIDKNLFFNDDPNRTLYNYLNIAEIEDKNPLRAFYECISNGGNYEECLKLIKDKKLQDQMKKTLEAYNDCIKNAKTEEERIKCLDLIKDENLKKSLLNQQKVQVALDCLKNAKTDEERNECLKLINDPEIREKFRKELELQKELQEYKDCIKNAKTEAEKNKCLKGLSKEAIERLKQQALDCLKNAKTDEERNECLKNIPQDLQKELLADMSVKAYKDCVSKARNEKEKQECEKLLTPEARKKLEQQVLDCLKNAKTDEERKKCLKDLPKDLQSDILAKESLKAYKDCVSQAKTEAEKKECEKLLTPEAKKLLEEEAKESVKAYLDCVSQAKTEAEKKECEKLLTPEAKKKLEEAKKSVKAYLDCVSRARNEKEKKECEKLLTPEAKKLLEQQALDCLKNAKTDKERKKCLKDLPKDLQKKVLAKESVKAYLDCVSQAKTEAEKKECEKLLTPEARKLLEEAKKSVKAYLDCVSQAKTEAEKKECEKLLTPEARKLLEEXAKESVKAYLDCVSQAKNEAEKKECEKLLTLESKKKLEEAKKSVKAYLDCVSQAKTEAEKKECEKLLTPEAKKLLEQQALDCLKNAKTEADKKRCVKDLPKDLQKKVLAKESLKAYKDCVSKARNEKEKKECEKLLTPEAKKLLEEAKKSVKAYLDCVSQAKTEAEKKECEKLLTPEARKLLEEAKESVKAYKDCVSKARNEKEKKECEKLLTPEAKKLLEQQVLDCLKNAKTEADKKRCVKDLPKDLQKKVLAKESVKAYLDCVSRARNEKEKKECEKLLTPEAKKLLEEAKESLKAYKDCLSQARNEEERRACEKLLTPEARKLLEQEVKKSIKAYLDCVSRARNEKEKKECEKLLTPEARKFLAKQVLNCLEKAGNEEERKACLKNLPKDLQENILAKESLKAYKDCLSQARNEEERRACEKLLTPEARKLLEQEVKKSVKAYLDCVSRARNEKEKKECEKLLTPEARKFLAKELQQKDKAIKDCLKNADPNDRAAIMKCLDGLSDEEKLKYLQEAREKAVADCLAMAKTDEEKRKCQNLYSDLIQEIQNKRTQNKQNQLSKTERLHQASECLDNLDDPTDQEAIEQCLEGLSDSERALILGIKRQADEVDLIYSDLRNRKTFDNMAAKGYPLLPMDFKNGGDIATINATNVDADKIASDNPIYASIEPDIAKQYETEKTIKDKNLEAKLAKALGGNKKDDDKEKSKKSTAEAKAENNKIDKDVAETAKNISEIALKNKKEKSGEFVDENGNPIDDKKKAEKQDETSPVKQAFIGKSDPTFVLAQYTPIEITLTSKVDATLTGIVSGVVAKDVWNMNGTMILLDKGTKVYGNYQSVKGGTPIMTRLMIVFTKAITPDGVIIPLANAQAAGMLGEAGVDGYVNNHFMKRIGFAVIASVVNSFLQTAPIIALDKLIGLGKGRSERTPEFNYALGQAINGSMQSSAQMSNQILGQLMNIPPSFYKNEGDSIKILTMDDIDFSGVYDVKITNKSVVDEIIKQSTKTLSREHEEITTSPKGGN

SEQ ID NO: 227 - protein, 381 aa, Artificial Sequence
  Description of Artificial Sequence:  Synthetic Peptide
VKCFLSIFSFLTFCGLSLNGTEVVITLEPALKAIQADAQAKQKTAQAELKAIEAQSSAKEKAIQAQIEGELRTQLATMSAMLKGANGVINGVNGMTGGFFAGSDILLGVMEGYSSALSALGGNVKMIVEKQKINTQTEIQNMQIALQKNNEIIKLKMNQQNALLEALKNSFEPSVTLKTQMEMLSQALGSSSDNAQYIAYNTIGIKAFEETLKGFETWLKVAMQKATLIDYNSLTGQALFQSAIYAPALSFFSSMGAPFGIIETFTLAPTKCPYLDGLKISACLMEQVIQNYRMIVALIQNKLSDADFQNIAYLNGINGEIKTLKGSVDLNALIEVAILNAENHLNYIENLEKKADLWEEQLKLERETTARNIASSKVIVK

SEQ ID NO: 228 - protein, 370 aa, Artificial Sequence
  Description of Artificial Sequence:  Synthetic Peptide
  MOD_RES (248): x = any natural occuring acid
MAGTQAIYESSSAGFLSEISSIISSTSGVAGPFAGIVAGAMSAAIIPIVVGFTNPQMTAIMTQYNQSIAEAVSMPMKAANQQYNQLYQGFNDQSMAVGNNILNISKLTGEFNVQGNTQGAQISAVNSQIASILASNTTPKNPSAIEAYATNQIAVPSVPTTVEMMSGILGNITSAAPKYALALQEQLRSQASNSSMNDTADSLDSCTALGALVGSSKVFFSCMQISMTPMSVSMPTVYAKYQALXTNALTSGTNPMTTPACPIGDKVLAVYCYAEKVAEILREYYIEFVKNNTNLLQNASQMILNQSGLATSTYDTQAISNISSLYNYNIVANKSFLKSHLTYLDYIKNKLKGQKDSYLTERVQTKIIVK

SEQ ID NO: 229 - protein, 142 aa, Artificial Sequence
  Description of Artificial Sequence:  Synthetic Peptide
MKTNFYKIKLLFAWCLIIGMFNAPLNADQNTDIKDISPEDMALNSVGLVSRDQLKIEIPKETLEQKVAVLNDYNDKNVNIKFDNISLGSFQPNDNLGINAMWGIQNLLMSQMMGDYGPNNPFMYGYAPTYSDSSFLPPILGY

SEQ ID NO: 230 - protein, 983 aa, Artificial Sequence
  Description of Artificial Sequence:  Synthetic Peptide
VFVASKQADEQKKLVIEQEVQKRQFKKIEELKADMQKGVNPFFKVLFDGGNRLFGFPETFIYSSIFILFVTIVLSVILFQAYEPVLIVAIVIVLVALGFKKDYRLYQRMERAMKFKKPFLFKGVKNKAFMSIFSMKPSKEMANDIHLNPNREDRLVSAANSYLANNYECFLDDGVILTNNYSLLGTIKLGGIDFLTTSKKDLIELHASIYSVFRNFVTPEFKFYFHTVKKKIVIDETNRDYSLIFSNDFMRAYNEKQKRESFYDISFYLTIEQDLLDTLNEPVMNKKHFADNNFEEFQRIIRAKLENFKDRIELIEELLSKYHPIRLKEYTKDGVIYSKQCEFYNFLVGMNEAPFICNRKDLYLKEKMHGGVKEVYFANKHGKILNDDLSEKYFSAIEISEYAPKSQSDLFDKINALDSEFIFMHAYSPKNSQVLKDKLAFTSRRIIISGGSKEQGMTLGCLSELVGNGDITLGSYGNSLVLFADSFEKMKQSVKECVSSLNAKGFLANAATFSMENYFFAKHCSFITLPFIFDVTSNNFADFIAMRAMSFDGNQENNAWGNSVMTLKSEINSPFYLNFHMPTDFGSASAGHTLILGSTGSGKTVFMSMTLNAMGQFVHNFPANVSKDKQKLTMVYMDKDYGAYGNIVAMGGEYVKIELGTDTGLNPFAWAACVQKTNATMEQKQTAISVVKELVKNLATKSDEKDENGNSISFSLADSNTLAAAVTNLITGDMNLDYPITQLINAFGKDHNDPNGLVARLAPFCKSTNGEFQWLFDNKATDRLDFSKTIIGVDGSSFLDNNDVSPFICFYLFARIQEAMDGRRFVLDIDEAWKYLGDPKVAYFVRDMLKTARKRNAIVRLATQSITDLLACPIADTIREQCPTKIFLRNDGGNLSDYQRLANVTEKEFEIITKGLDRKILYKQDGSPSVIASFNLRGIPKEYLKILSTDTVFVKEIDKIIQNHSIIDKYQALRQMYQQIKEY

SEQ ID NO: 231 - protein, 207 aa, Artificial Sequence
  Description of Artificial Sequence:  Synthetic Peptide
LINNNSNKKLRGFFVKVLLSLVVFSSYGLANDDKEAKKEVLEKEKNTPNGLVYTNLDFDSFKATIKNLKDKKVTFKEVNPDIIKDEVFDFVIVNRVLKKIKDLKHYDPVIEKIFDEKGKEMGLNVELQINPEVKDFFTFKSISTTNKQRCFLSLRGETREILCDDKLYNVLLAVFNSYDPNDLLKHISTVESLKKIFYTITCEAVYL

SEQ ID NO: 232 - protein, 1186 aa, Artificial Sequence
  Description of Artificial Sequence:  Synthetic Peptide
MTNETIDQTRTPDQTQSQTAFDPQQFINNLQVAFIKVDNVVASFDPDQKPIVDKNDRDNRQAFDGISQLREEYSNKAIKNPTKKNQYFSDFIDKSNDLINKDNLIDVESSTKSFQKFGDQRYQIFTSWVSHQKDPSKINTRSIRNFMENIIQPPIPDDKEKAEFLKSAKQSFAGIIIGNQIRTDQKFMGVFDESLKERQEAEKNGGPTGGDWLDIFLSFIFNKKQSSDVKEAINQEPVPHVQPDIATTTTDIQGLPPEARDLLDERGNFSKFTLGDMEMLDVEGVADIDPNYKFNQLLIHNNALSSVLMGSHNGIEPEKVSLLYAGNGGFGDKHDWNATVGYKDQQGNNVATLINVHMKNGSGLVIAGGEKGINNPSFYLYKEDQLTGSQRALSQEEIRNKVDFMEFLAQNNTKLDNLSEKEKEKFQNEIEDFQKDSKAYLDALGNDRIAFVSKKDTKHSALITEFNNGDLSYTLKDYGKKADKALDREKNVTLQGSLKHDGVMFVDYSNFKYTNASKNPNKGVGATNGVSHLEAGFNKVAVFNLPDLNNLAITSFVRRNLENKLTAKGLSLQEANKLIKDFLSSNKELAGKALNFNKAVAEAKSTGNYDEVKKAQKDLEKSLRKREHLEKEVEKKLESKSGNKNKMEAKAQANSQKDEIFALINKEANRDARAIAYTQNLKGIKRELSDKLEKISKDLKDFSKSFDEFKNGKNKDFSKAEETLKALKGSVKDLGINPEWISKVENLNAALNEFKNGKNKDFSKVTQAKSDLENSVKDVIINQKVTDKVDNLNQAVSVAKAMGDFSRVEQVLADLKNFSKEQLAQQAQKNEDFNTGKNSELYQSVKNSVNKTLVGNGLSGIEATALAKNFSDIKKELNEKFKNFNNNNNGLKNSTEPIYAKVNKKKTGQVASPEEPIYTQVAKKVNAKIDRLNQIASGLGGVGQAAGFPLKRHDKVDDLSKVGLSASPEPIYATIDDLGGPFPLKRHDKVDDLSKVGRSRNQELAQKIDNLNQAVSEAKAGFFGNLEQTIDKLKDSTKKNVMNLYVESAKKVPASLSAKLDNYAINSHTRINSNIQNGAINEKATGMLTQKNPEWLKLVNDKIVAHNVGSVSLSEYDKIGFNQKNMKDYSDSFKFSTKLNNAVKDIKSGFTHFLANAFSTGYYCLARENAEHGIKNVNTKGGFQKS

SEQ ID NO: 233 - protein, 416 aa, Artificial Sequence
  Description of Artificial Sequence:  Synthetic Peptide
VAINTFLKHSFLVCLLAVNSYAFDWNIFKYNLGFNMFIMDHEGSTPYWVNTNTNLKTRLTPNFGIQFYTRGVEQSLTVGAYFFQNFHNYSTNFPYRWGPTMYYKARGKRFTFYGGIFPRKNLLGRYGLNIFAPYYWFIDPNARGFLLQFQNHYSPSKPYYGHAEFMLDWFGGNCYNTCKFGRNPYGNAMDRFQMNGSVAYNFFKDLLGIGGYFVLFHNEDKYLLNGADGMQFNEKKAIDNSAIYLLDRLYYNAYISTSLLDIAPFMEKLSAKFGMVSEASRLRNREKEVPFINSVGGQFDVEIQYKGFGIHNLFFFAKTPEMPFYNQYQYVEMYCTPSYCPTPIYRGVPFFQANMYNRFDFYYNWKNDFASVRINFVLNAMRGGFDRSLPWSESYQVYMTVAFDPYNLINKIARKK

SEQ ID NO: 234 - protein, 340 aa, Artificial Sequence
  Description of Artificial Sequence:  Synthetic Peptide
MMIFIDACFRKETPYTPIWMMRQAGRYLSEYQESRKKAGSFLELCKNSDLATEVTLQPVEILGVDAAILFSDILVVPLEMGLNLEFIPKKGPHFLETITDLKSVESLKVGAYKQLNYVYDTISQTRQKLSREKALIGFCGSPWTLATYMIEGEGSKSYAKSKKMLYSEPEVLKALLEKLSLELIEYLSLQIQAGVNAVMIFDSWASALEKEAYLKFSWDYLKKISKELKKRYAHIPVILFPKGIGAYLDSIDGEFDVFGVDWGTPLTAAKKILGGKYVLQGNLEPTRLYDKNALEEGVETILKVMGNQGHIFNLGHGMLPDLPRENAKYLVQLVHAKTRR

SEQ ID NO: 235 - protein, 1028 aa, Artificial Sequence
  Description of Artificial Sequence:  Synthetic Peptide
MYKTAINRPITTLMFALAIVFFGTMGFKKLSVALFPKIDLPTVVVTTTYPGASAEIIESKVTDKIEEAVMGIDGIKKVTSTSSKNVSIVVIEFELEKPNEEALNDVVNKISSVRFDDSNIKKPSINKFDTDSQAIISLFVSSSSVPATTLNDYAKNTIKPMLQKINGVGGVQLNGFRERQIRIYANPTLMNKYNLTYADLFSTLKAENVEIDGGRIVNSQREFSILINANSYSVADVEKIQVGNHVRLGDIAKIEIGLEEDNTFASFKDKPGVILEIQKIAGANEIEIVDRVYEALKRIQAISPNYEIRPFLDTTGYIRTSIEDVKFDLVLGAILAVLVVFAFLRNGTITLVSAISIPISIMGTFALIQWMGFSLNMLTMVALTLAIGIIIDDAIVVIENIHKKLEMGMSKRKASYEGVREIGFALVAISAMLLSVFVPIGNMKGIIGRFFQSFGITVALAIALSYVVVVTIIPMVSSVVVNPRHSRFYVWSEPFFKALESRYTKLLQWVLNHKIIISIAVVLVFVGSLFVASKIGMEFMLKEDRGRFLVWLKAKPGVSIDYMTQKSKIFQKAIEKHAEVEFTTLQVGYGTTQNPFKAKIFVQLKPLKERKKEHQLGQFELMSVLRKELRSLPEAKGLDTINLSEVTLIGGGGDSSPFQTFVFSHSQEAVDKSVENLKKFLLESPELKGKVESYHTSTSESQPQLQLKILRQNANKYGVSAQTIGSVVSSAFSGTSQASVFKEDGKEYDMIIRVPDDKRVSVEDIKRLQVRNKYDKLMFLDALVEITETKSPSSISRYNRQRSVTVLAEPNRNAGVSLGEILTQVSKNTKEWLVEGANYRFTGEADNAKESNGEFLVALATAFVLIYMILAALYESILEPFIIMVTMPLSFSGAFFALGLVHQPLSMFSMIGLILLIGMVGKNATLLIDVANEERKKGLNIQEAILFAGKTRLRPILMTTIAMVCGMLPLALASGDGAAMKSPIGIAMSGGLMISMVLSLLIVPVFYRLLAPIDDKIKRFYQNQKTLE

SEQ ID NO: 236 - protein, 194 aa, Artificial Sequence
  Description of Artificial Sequence:  Synthetic Peptide
MKKVLIINGAKAFGSSGGKLNETLTDHAKKTLESLGLEVDTTIVDKGYEHAQEVEKVFSADATIWQMPGWWMGEPWIVKKYIDEVFSVGHGKLYASDGRSSQNPTKNYGKGGLMQGKKYMLSLTWNAPIEAFNDPSEFFEGVGVDVVYLHLHKAFQFLGLSALPTFICNDVVKNPQVEQYLNSLTTHLRQAFGK

SEQ ID NO: 237 - protein, 512 aa, Artificial Sequence
  Description of Artificial Sequence:  Synthetic Peptide
LVFVFLFKCVNEETSLNFTPLLERMACNLQARFYSVYKDNTTSFYLQASAETTLEFAQKLSEILPFSLDFSFLSLKEITEPLDENLFQTASLSKPLFMNAKEHQDFLDKNSSLYADTLGLIKNTAFKGDIIHSPKELIDCLTQLKGMLKTQDFIPIFTSREALSLSLKNPSPSVIFSDLSSVLSCTKLPLEDAKYLASLEKPSIKAPLKSVFKDTFKNDEIIAQLPYDPILNLLCHILQDEGIEFVFMHESRSCEALLYYEALFKTPKRLITPTKKFVLENNFSTFPFKDELEFLSATPNSIVLYLSFKRPTRLLLHANGSLKTLLSVSFDFNKMFNALKQDEKASRMLQNYATKFPDFYARIVELSKYDLGGANLLDFFCILGFVLGYSEDFCTQSVIPLAKECLRPKGPRIDYKILKDNSLKMALNFSKIMHSAMSFRLAGVENEILSLGILDSLAEFLGNFIWDNAQNFSVQEVTIAGDFFGEKVFLDLFVRYFPKTLALKTHAFLDYE

SEQ ID NO: 238 - protein, 916 aa, Artificial Sequence
  Description of Artificial Sequence:  Synthetic Peptide
IKKLILSSLVFACINTSVEALENDGSKPNDLTSPKEASQESQKNEAPKNEVQRNEAQKETPQSNQTPKEMKVKSISYVGLSYMSDMLANEIVKIRVGDIVDSKKIDTAVLALFNQGYFKDVYATFEGGILEFHFDEKARIAGVEIKGYGTEKEKDGLKSQMGIKKGDTFDEQKLEHAKTALKTALEGQGYYGSVVEVRTEKVSEGALLIVFDVNRGDSIYIKQSIYEGSAKLKRRMIESLSANKQRDFMGWMWGLNDGKLRLDQLEYDSMRIQDVYMRRGYLDAHISSPFLKTDFSTHDAKLHYKVKEGIQYRISDILIEIDNPVVPLKTLEKALKVKRKDVFNIEHLRADAQILKTEIADKGYAFAVVKPDLDKDEKNGLVKVIYRIEVGDMVYINDVIISGNQRTSDRIIRRELLLGPKDKYNLTKLRNSENSLRRLGFFSKVKIEEKRVNSSLMDLLVSVEEGRTGQLQFGLGYGSYGGLMLNGSVSERNLFGTGQSMSLYANIATGGGRSYPGMPKGAGRMFAGNLSLTNPRIFDSWYSSTINLYADYRISYQYIQQGGGFGVNVGRMLGNRTHVSLGYNLNVTKLLGFSSPLYNRYYSSVNEVVSPRQCSTPASVIINRLSGGKTPLQPESCSSPGAITTSPEIRGIWDRDYHTPITSSFTLDVSYDNTDDYYFPRNGVIFSSYATMSGLPSSGTLNSWNGLGGNVRNTKVYGKFAAYHHLQKYLLIDLIARFKTQGGYIFRYNTDDYLPLNSTFYMGGVTTVRGFRNGSVTPKDEFGLWLGGDGIFTASTELSYGVLKAAKMRLAWFFDFGFLTFKTPTRGSFFYNAPVTTANFKDYGVIGAGFERATWRASTGLQIEWISPMGPLVLIFPIAFFNQWGDGNGKKCKGLCFNPNMDDYTQHFEFSMGTRF

SEQ ID NO: 239 - protein, 414 aa, Artificial Sequence
  Description of Artificial Sequence:  Synthetic Peptide
MRKIFSYVLKALLFIGIVYAEPESKVEALEGRKQESSLDKKIRQELKNKDLKNKELKNKKEEKKNTEEKKETKAKRKPRAEVHHGDTKNPTQKITPPKIKENAKGVQNQGVQSNAPKLEEKDTTSQTLEKKGASPSSQFNSIFGNPNDAANNTLEDKVVGGISLLVNGSPITLYQIQEEQEKSKVSKAQARDRLIAERIKNQEIERLKIHVDDDKLDQEMAMMAQQQGMDLDHFKQMLMAEGHYKLYRDQLKEHLEMQELLRNILLTNVDTSSETKMREYYNKHKEQFSIPTEIETVRYTSTNQEDLERAMADPNLEIPGVSKANEKIEMKTLNPQIAQVFISHEQGSFTPVMNGGGGQFITFYIKEKKGKNEVSFSQAKQFIAQKLVEESKDKILEEHFEKLRVKSRIVMIRE

SEQ ID NO: 240 - protein, 433 aa, Artificial Sequence
  Description of Artificial Sequence:  Synthetic Peptide
MLSVIILAAGKGTRMRSSLPKTLHTICGEPMLFYILETAFSISDDVHLILHHQQERIKEAVLERFKGVIFHTQIVEKYSGTGGAIMQKDKTPISTKHERVLILNADMPLITKDALAPLLESKNNAIGLLHLADPKGYGRVVLENHQVKKIVEEKDANDEEKEIKSVNAGVYGFERDFLEKYLPKLHDQNAQKEYYLTDLIALGINENETIDAIFLKEECFLGVNSQTERAKAEEIMLERLRKNAMDLGVVMQLPNSIYLEKGVSFKGECVLEQGVRLIGNCLIENAHIKAYSVIEESQIVNSSVGPFAHARPKSVICNSHVGNFVETKNAKLQGTKAGHLSYLGDCEIGKNTNVGAGVITCNYDGKKKHQTIIGENVFIGSDSQLVAPINIGSNVLIGSGTTITKDIPSGSLSLSRAPQTNIENGYFKFFKKP

SEQ ID NO: 241 - protein, 642 aa, Artificial Sequence
  Description of Artificial Sequence:  Synthetic Peptide
MKEITIALVGQPNVGKSSLINALSNAHLKVGNFAGVTVDKMEVGLIHKEHQITIIDLPGTYALNDFTTEEKVTKDFLEKGQYDLILNVVDSTNLERNLALSAQLLDTNKKMLLALNMWDEAQKEGIKINTEKLSKELGVVCVPTSARSKEDRLNTELLLDEIVRLYSQNTTNNENIKVPSQSFKESLKYSQSAQRIAQLVISENQQNASFEHTYKIDKILMHKRYGIFIFLGFMFIIFSLSFLIGGGVQKALETGFKFLSDGIKENVANEDLASLVGDGIIGGVGATVSFLPLIVVLYFGISLLETTGYMSRVAFLLDGILHKFGLHGKSFIPLITGFGCSVPAYMATRTLQNYNERLITLFVIGFMSCSARLPIYVLFVGSFFPSSSAGFVLFCIYILGAVVALVMAKLLKLSVFKGQTESFIMEMPKYRFPSWRMVYFSIYTKSLSYLKKAGTYILVGAILIWFMSQYPKSDAAMKAYKQESLLVNKDTTLSSEAKEEKLKELKTELDKKNLKNSIVGRGGAYLEKVFSPMDFDWRLSVSLVTGFMAKEVVVSTLGVLFSLGDQNEKSDAFRGILRKEVSVPSGIAFIVFVMFYIPCFAATITFGREAGGIKFVAYLFIFTTVVAYAFSLIAFYATQILV

SEQ ID NO: 242 - protein, 765 aa, Artificial Sequence
  Description of Artificial Sequence:  Synthetic Peptide
MANLLKNGKTLKQARDEILARTEKTGHYNGLKKLEFKERDPIGYEKMFSKLRGGIVHARETAKRIAASPIVEQEGELCFTLYNAVGDSVLTSTGIIIHVGTMGSAIKYMVENNWEDNPGINDKDIFTNNDCAIGNVHPCDIMTLVPIFHDEKLIGWVGGVTHVIDTGSVTPGSMSTGQVQRFGDGYMITCRKTGANDESFKDWLHESQRSVRTPKYWILDERTRIAGCHMIRDLVMEVIKEDGIDSYMRFIDEVIEEGRRGLISRIKSMTIPGKYRKVAFVDVPYAHKDIGVCSEFAKLDTIMHSPVEITINKDATWKLDFDGASRWGWHSFNCNQVSFTSGIWVMMTQTLIPTSRINDGAYFATQFRLKKGTWMNPDDRRTGHAYAWHFLVSGWSALWRGLSQAYYSRGYLEEVNSGNANTSNWLQGGGINQDGEIHAVNSFETSSCGTGACAIKDGLNHAAAIWNPEGDMGDVEIWEMAEPLLYLGRNVKANTGGYGKYRGGNGFETLRMVWGAHDWTMFFMGNGYMNSDWGMMGGYPAASGYRFEAHNTDLKNRIKNNASLPLGGDFNPTDRDYEKHISHASQVKRDKQCITTENCFDNYDLYLNYIKGGPGFGDPIERDLNAILEDLNSKQLLPEYAYKVYGAVVSQNKDGVWVGDEAKTKARRKEILENRKARSIPVKQWMEQERNAILEKEASKQVKHMYATSFDLSPKFLNDFKTFWNLPKNWSVKEDELGVFTYGSKYRMDLSKLPDVRTVLLVDEK

SEQ ID NO: 243 - protein, 827 aa, Artificial Sequence
  Description of Artificial Sequence:  Synthetic Peptide
MQDNSVNETKNIVEVGIDSSIEESYLAYSMSVIIGRALPDARDGLKPVHRRILYAMHELGLTSKVAYKKSARIVGDVIGKYHPHGDNAVYDALVRMAQDFSMRLELVDGQGNFGSIDGDNAAAMRYTEARMTKASEEILRDIDKDTIDFVPNYDDTLKEPDILPSRLPNLLVNGANGIAVGMATSIPPHRMDEIIDALVHVLENPNAGLDEILEFVKGPDFPTGGIIYGKAGIIEAYKTGRGRVKVRAKVHVEKTKNKEIIVLDEMPFQTNKAKLVEQISDLAREKQIEGISEVRDESDREGIRVVIELKRDAMSEIVLNHLYKLTTMETTFSIILLAIYNKEPKIFTLLELLHLFLNHRKTIIIRRTIFELEKAKARAHILEGYLIALDNIDEIVRLIKTSQSPEAAKNALMERFTLSEIQSKAILEMRLQRLTGLERDKIKEEYQNLLELIDDLNGILKSEDRLNGVVKTELLEVKEQFSSPRRTEIQESYENIDIEDLIANEPMVVSMSYKGYVKRVDLKAYEKQNRGGKGKLSGSTYEDDFIENFFVANTHDILLFITNKGQLYHLKVYKIPEASRIAMGKAIVNLISLAPDEKIMATLSTKDFSDERSLAFFTKNGVVKRTNLSEFESNRSCGIRAIVLDEGDELVSAKVVDKNAKHLLIASHLGIFIKFPLEEVREIGRTTRGVIGIKLNENDFVVGAVVISDDGNKLLSVSENGLGKQTLAEAYRGQSRGGKGVIGMKLTQKTGNLVGVISVDDENLDLMILTASAKMIRVSIKDIRETGRNASGVKLINTADKVMYVNSCPKEEEPENLETSSAQNLFE

SEQ ID NO: 244 - protein, 273 aa, Artificial Sequence
  Description of Artificial Sequence:  Synthetic Peptide
MEFMKKFVALGLLSAVLSSSLLAEGDGVYIGTNYQLGQARLNSNIYNTGDCTGSVVGCPPGLTANKHNPGGTNINWHAKYANGALNGLGLNVGYKKFFQFKSFDMTSKWFGFRVYGLFDYGHATLGKQVYAPNKIQLDMVSWGVGSDLLADIIDNDNASFGIFGGVAIGGNTWKSSAANYWKEQIIEAKGPDVCTPTYCNPNAPYSTKTSTVAFQVWLNFGVRANIYKHNGVEFGVRVPLLINKFLSAGPNATNLYYHLKRDYSLYLGYNYTF

SEQ ID NO: 245 - protein, 414 aa, Artificial Sequence
  Description of Artificial Sequence:  Synthetic Peptide
MAILRANLSPKNKLNATLKGWLPILQSELEDLEEVLKQNALDNPLIKIENKRIKNFSDRFSAKKSSDHLENFATASKSLFETLEAQIIPPLFPTETSQKIAMDIISGLNNEGYFEENIEERARILGVESEVYEKVRKRFSYLNPAGIGAKDVKESFLFQLESRELDDNELYEETRKIILNLEKHHEFSKDFYYEKALKILKSFKNPPAIEFLEKEIEVIPELFIVEVDNGIIVRLNDESYPTISLEENRFKDSGYLKEKLKEAKDLIDALNLRKATIYKIGLMLLEYQYDFFKGKELRPLKLLDLANEFNHSVSTISRAISNKYLACERGVFPIKHFFSIALDNSETSNAVIKDYLLELIKNEDKKEPLSDAKILELIEEKFHLKMVRRTITKYRQLLNIASSSERKRLYLMRA

SEQ ID NO: 246 - protein, 578 aa, Artificial Sequence
  Description of Artificial Sequence:  Synthetic Peptide
MQVLALKYRPKHFSELVGQESVAKTLSLALDNQRLANAYLFSGLRGSGKTSSSRIFARALMCEEGPKAVPCDTCIQCQSALNNHHIDIIEMDGASNRGIDDVRNLIEQTRYKPSFGRYKIFIIDEVHMFTTEAFNALLKTLEEPPSHVKFLLATTDALKLPATILSRTQHFRFKKIPENSVISHLKTILEKEQVSYETSALEKLAHSGQGSLRDTITLLEQAINYCDNAITESKVAEMLGAIDRSVLEDFFQSLINQDEARLKERYAILENYETESVLEEMMLFLKAKLLSPDFYSILLIERFFKIIMSSLSLLKEGANASFVLLLLKMKFKEALKFKALDDAILELEQTPFNQNPSISYNAPKQESKNIEKREKIEQIERIEGTEKREKLEKKENAETPQTPMLSAKDRIFHNLFKQVQTLVYERNYELGAVFEKNIRFIDFDSQTKTLTWESLATDKDKELLRERFKIVKSIVDGVFGKGESIKIALKNHSENKSTLEVVKELKFPYSKPKPTTETTAETKEKETKEKEIQENDTKEIQEVQPKQAPTALQEFMANHSELIEEIKSEFEIKSVELL

SEQ ID NO: 247 - protein, 348 aa, Artificial Sequence
  Description of Artificial Sequence:  Synthetic Peptide
MRIFLKLLILLFCLKGQVMAQNLPTIALLATGGTIAGSGASASLGSYKSGELGIKELLKAIPSLNRLARIQGEQISNIGSQDMNEEVWFKLAKRAQELLDDSRIQGVVITHGTDTLEESAYFLNLVLRSTKPVVLVGAMRNAASLSADGALNLYNAVSVALNEKSANKGVLVVMDDNIFSAREVIKTHTTHTSTFKALNSGAIGSVYYGKTRYYMQPLRKHTTESEFSLSQLKTPLPKVDIIYTHAGMTPDLFQASLNSHAKGVVIAGVGNGNVSAGFLKAMQEASQMGVVIVRSSRVNSGEITSGEIDDKAFITSDNLNPQKARVLLQLALTKTNNKEKIQEMFEEY

SEQ ID NO: 248 - protein, 328 aa, Artificial Sequence
  Description of Artificial Sequence:  Synthetic Peptide
MDFKNKKWLFLAPLAGYTDLPFRSVVKKFGVDVTTSEMVSSHSLVYAFDKTSKMLEKSPLEDHFMAQISGSKESVVKEAVEKINALEHVNGIDFNCGCPAPKVANHGNGSGLLKDLNHLVKLLKTIRENTSKKITSVKVRLGFEKKIPKEIAHALNDAPVDYVVVHGRTRSDKYQKDKIDYESIALMKKILKKPVIANGEIDSVKKAFEVLQITQADGLMIGRAALRAPWIFWQIRNNTTKLPAVVKKDLVLEHFDKMVEFYGDMGVIMFRKNLHAYAKGEMQASAFRNCVNTLTEIKSMRESIEEFFNQEMLQSEVPLWVELNQKSV

SEQ ID NO: 249 - protein, 674 aa, Artificial Sequence
  Description of Artificial Sequence:  Synthetic Peptide
MAIGSLSSLGLGSKVLNYDVIDKLKDADEKALIAPLDKKMEQNVEKQKALVEIKTLLSALKGPVKTLSDYSTYISRKSNVTGDALSASVGVGVPIQDIKVDVQNLAQGDINELGAKFSSRDDIFSQVDTTLKFYTQNKDYAVNIKAGMTLGDVAQSITDATNGEVMGIVMKTGGNDPYQLMVNTKNTGEDNRVYFGSHLQSTLTNKNALSLGVDGSGKSEVSLNLKGADGNMHEVPIMLELPESASIKQKNTAIQKAMEQALENDPNFKNLIANGDISIDTLHGGESLIINDRRGGNIEVKGSKAKELGFLQTTTQESDLLKSSRTIKEGKLEGVVSLNGQKLDLSALTKESNTSEENTDAIIQAINAKEGLSAFKNAEGKLVINSKTGMLTIKGEDALGKASLKDLGLNAGMVQSYEASQNTLFMSKNLQKASDSAFTYNGVSITRPTNEVNDVISGVNITLEQTTEPNKPAIISVSRDNQAIIDSLTEFVKAYNELIPKLDEDTRYDADTKIAGIFNGVGDIRAIRSSLNNVFSYSVHTDNGVESLMKYGLSLDDKGVMSLDEAKLSSALNSNPKATQDFFYGSDSKDMGGREIHQEGIFSKFNQVIANLIDGGNAKLKIYEDSLDRDAKSLTKDKENAQELLKTRYNIMADVLPLMIAKSLKPIKNSIPCK

SEQ ID NO: 250 - protein, 462 aa, Artificial Sequence
  Description of Artificial Sequence:  Synthetic Peptide
MQIATAIWKTRIWQLQTHFDKKEAHLKHLEAQHKEFVRDEKRYLEKEKKELEKERQILEQEKENFKKQRAVCKESQAKALDAMLNYMAYTKDEIKSMILEQLEEELEAQKSALIRRYEKEAKEEGKKKSYAILAEATARFAGNYAAENLTTRIALPCSDYIGRVIGKDGKNIEAFKKVSGVDIEFSEDSSELCLSSFNLYRREVASETLKILIEDGRIQPNRIEEVYHRVARNLEKELLSEGESVVLELELGAMEDELKILIGKMRYRSSFGQNALQHSKEVALLAGLIAEQLGGDKKLARRAGILHDIGKALTQELGRDHVNLGVEVCKRHKEDPVVINAIYAHHGHEEILSVECASVCAADALSAGRPGARRKSDEEYAKRMQALEEIALEFDGVEKAYAMESGRELRVIVKSNQVRDNQVPIIARKIAKKIEESAQYVGEVGVQVVRESRFKTTATLKQ

SEQ ID NO: 251 - protein, 119 aa, Artificial Sequence
  Description of Artificial Sequence:  Synthetic Peptide
MPMRLHTAFFGINSLLVASLLISGCSLFKKRNTNAQLIPPSANGLQAPIYPPTNFTPRKSIQPLPSPRLENNDQPVISSNPTNAIPNTPILTPNNVIELNAWAWAWLQNPPFHPLKPWL

SEQ ID NO: 252 - protein, 527 aa, Artificial Sequence
  Description of Artificial Sequence:  Synthetic Peptide
MENNPNNNQASLERNELHNTIWKVANELRGSVDGWDFKQYVLGILFYRYISENMTHYINKEERKRDPSFDYAKLSDEKAERGRKHLIEQKGFFIPPSALFCNALKNACHNEDLNVTLQNIFNEIEKSSLGTPSEENVKGLFADLDVNSNKLGSSHQNRVEKLTKILEAIGGMQLGDYLKSGIDVFGDAYEYLMAMYASNAGKSGGEFFTPQEVSELLAKITLHGQESVNKVYDPCCGSGSLLLQFSKVLGDKNVSKGYFGQEINLTTYNLCRINMFLHDINYSKFHIAHGDTLLDPKHEDDEPFDAIVSNPPYSTKWVGDSNPILINDERFSPAGVLAPKNAADLAFTMHMLSYLSNSGTAAIVEFPGVLYRGNAEAKIREYLVKENVIDCVIALPDNLFFGTSIATCILVLKKNKQDDTTLFIDASKEFVKEGKKNKLKERNREKILQTYIERKEIKHFCALANIEKIKENDYNLSVNRYVEQEDTKEAIDIKALNSEIAQIVEKQSALRNRLESIIKELEGGQNA

SEQ ID NO: 253 - protein, 533 aa, Artificial Sequence
  Description of Artificial Sequence:  Synthetic Peptide
MLQTINLTQRYATKKLFENVNIKLDKNKRYGLIGANGAGKSTFLKILSKSIDCSSGEVIITSGMKMGVLGQDQYAFEDLSLKDAVLIGNKRLYDAIKEKERLYTEGDLSDDKVNARLGELETICVEEDPMYECEVAIEKILEDLGIPSSKHNDLMKTLPSSDKFKILLAQVLFPKPDILLLDEPTNNLDLNAIEWLENNLKRHEGTMVVISHDRHFLNAVCTHILDLDFHSVREFSGNYDDWYIASTLIAKQQEAERNKKLKEKEELEKFIARFSANASKAKQATSRQKQLDKLDIQSLAVSSRRDPSIIFKPKRTIGNEALECENISKSYDDQIVLNQVSLKVMPKDKIALIGPNGVGKSTLCKILVEELKPDKGVVKWGATVSKGYFPQNVSEEISGEETLYQWLFNFNKKIESAEVRNALGRMLFNGEEQEKCVNALSGGEKHRMVLSKLMLEGGNFLVLDEPTNHLDLEAIIALGEALFKFDGALICVSHDRELIDAYANRIIELVPSPKGASIIDFKGSYEEYLASKK

SEQ ID NO: 254 - protein, 542 aa, Artificial Sequence
  Description of Artificial Sequence:  Synthetic Peptide
MNKPFLILLIALIVFSGCNMRKYFKPAKHQIKGEAYFPNHLQESIVSSNRYGAILKNGAVIGDKGLTQLRIGKNFNYESSFLNESQGFFILAQDCLNKIDKKTNKSKVAKTEETELKLKGVEAEVQDKVCHQVELISNNPNASQQSIVIPLETFALSASVKGNLLAVVLADNSANLYDITSQKLLFSEKGSPSTTINSLMAMPIFMDTVVVFPMLDGRLLVVDYVHGNPTPIRNIVISSDKFFNNITYLIVDGNNMIASTGKRILSVVSGQEFNYDGDIVDLLYDKGTLYVLTLDGQILQMDKSLRELNSVKLPSSLNTIVLNHNKLYSLEKRGYVIEVDLNDFDSYNVYKTPTIGSFKFFSSNRLDKGVFYDKNRVYYDRYYLDYNDFKPKLYPVVEKSASKKSQKGEKGNAPIYLQERHKAKENKQPLEENKVKPRNSGFEEEEVKTRRPEPIRDQNNATQQGETKNNESKNAPVLKENAAKKEVPKPNSKEEKRRLKEEKKKAKAEQRAREFEQRAREHQERDEKELEERRKALEMNKK

SEQ ID NO: 255 - protein, 291 aa, Artificial Sequence
  Description of Artificial Sequence:  Synthetic Peptide
MKRRDFIKTTTLGATGAVLGAQILQAEESKGSVAKYKIEAQYSIDFDSAEHTSLFIPMPSVVASNVHLQGNHASYKSMLNFGVPYLQVDFLKSTQKKQVHLSYEIASYQLNERLFETSDFVAMGRYERDDASVANIANQLKGTTPKESVRNFYAFIKHEMPKRQKALEGKENLPKRESLPWFATISKESMFVSLCHACGIKSAEVQGLKLGQNSVVKNAPRVEVYLKDSFLAFDFQNNHKEVFIPLNRHKDMQLDSALLATFGDAFALVDGRDLGNYESKLFEKRVSYTIV

SEQ ID NO: 256 - protein, 505 aa, Artificial Sequence
  Description of Artificial Sequence:  Synthetic Peptide
MVNKDVKQTTAFGAPVWDDNNVITAGPRGPVLLQSTWFLEKLAAFDRERIPERVVHAKGSGAYGTFTVTKDITKYTKAKIFSKVGKKTECFFRFSTVAGERGSADAVRDPRGFAMKYYTEEGNWDLVGNNTPVFFIRDAIKFPDFIHTQKRDPQTNLPNHDMVWDFWSNVPESLYQVTWVMSDRGIPKSFRHMDGFGSHTFSLINAKGERFWVKFHFHTMQGVKHLTNEEAAEVRKYDPDSNQRDLFNAIARGDFPKWKLSIQVMPEEDAKKYRFHPFDVTKIWYLQDYPLMEVGIVELNKNPENYFAEVEQAAFSPANVVPGIGYSPDRMLQGRLFSYGDTHRYRLGVNYPQIPVNKPRCPFHSSSRDGYMQNGYYGSLQNYTPSSLPGYKEDKSARDPKFNLAHIEKEFEVWNWDYRADDSDYYTQPGDYYRSLPADEKERLHDTIGESLAHVTHKEIVDKQLEHFKKADPKYAEGVKKALEKHQKMMKDMHGKDMHHTKKKK

SEQ ID NO: 257 - protein, 791 aa, Artificial Sequence
  Description of Artificial Sequence:  Synthetic Peptide
MFLRVYPKLRYALCFPLLAETCYSEERTLNKVTTQAKRIFTYNNEFKVTSKELDQRQSNEVKDLFRTNPDVNVGGGSVMGQKIYVRGVEDRLLRVTVDGAAQNGNIYHHQGNTVIDPGMLKSVEVTKGAANASAGPGAIAGVIKMETKGAADFIPRGKNYAASGAVSFYTNFGDRETFRSAYQNAHFDIIAYYTHQNIFYYRSGATAMKNLFNPTQADKEPGTPSEQNNALIKMNGYLSDRDTLTFSWNMTRDNATRPLRSNAIGLAYPCEAPFSPDSSQGCPNVLDSFTRYMYHSINSANNLSLQYKREAGNSFGDPRLDFTLYTSIRNAQFDPLFDPNGVYAKFPTSLASAWEKENYPCVEGAYCTPSFSDVDKPSSQPRNLFLNNTGLNLKVAHVIDEATDSLFEYGFNYQNLSVFDARIPKSELYRPNQVYTDDKGQKQIACSLVNNNPNDPTLCQRGKANGNIYGGYVQANYSPHKIITFGAGVRWDAYTLYDKDWNHRYTQGFSPSAALVLSPIEPLSLKITYSQVTRGVMPGDGVYMRQNDLRYAKNIKPEVGSNAEFNIDYSSQYFSGRAAAFYQALDNFISQYAQNLIVTNLSQAIRIYGYEVGGTFRYKGVSLNVGVSRTWPTTRGYLMADSYELAASTGNVFIIKLDYTIPKTGINLAWLSRFVTGLDYCGFDIYLPDYGTAEKPKTPTDLAKCGSQLGLVHMHKPGYGVSNFYINWSPKTKSRWKGLLLSAVFNNVFNKFYVDQTSPYVMSPDMPGTDAVKRAIAEPGFNARFEVAYKW

SEQ ID NO: 258 - protein, 1290 aa, Artificial Sequence
  Description of Artificial Sequence:  Synthetic Peptide
MEIQQTHRKINRPLVSLALVGALVSITPQQSHAAFFTTVIIPAIVGGIATGAAVGTVSGLLGWGLKQAEEANKTPDKPDKVWRIQAGKGFNEFPNKEYDLYRSLLSSKIDGGWDWGNAATHYWVKGGQWNKLEVDMKDAVGTYNLSGLRNFTGGDLDVNMQKATLRLGQFNGNSFTSYKDSADRTTRVDFNAKNILIDNFLEINNRVGSGAGRKASSTVLTLQASEGITSSKNAEISLYDGATLNLASNSVKLMGNVWMGRLQYVGAYLAPSYSTINTSKVTGEVNFNHLTVGDHNAAQAGIIASNKTHIGTLDLWQSAGLNIIAPPEGGYKDKPKDKPSNTTQNNANNNQQNSAQNNSNTQVINPPNSAQKTEIQPTQVIDGPFAGGKDTVVNIDRINTNADGTIKVGGYKASLTTNAAHLHIGKGGINLSNQASGRTLLVENLTGNITVDGPLRVNNQVGGYALAGSSANFEFKAGTDTKNGTATFNNDISLGRFVNLKVDAHTANFKGIDTGNGGFNTLDFSGVTGKVNINKLITASTNVAVKNFNINELVVKTNGVSVGEYTHFSEDIGSQSRINTVRLETGTRSIFSGGVKFKSGEKLVIDEFYYSPWNYFDARNIKNVEITRKFASSTPENPWGTSKLMFNNLTLGQNAVMDYSQFSNLTIQGDFINNQGTINYLVRGGQVATLNVGNAAAMFFSNNVDSATGFYQPLMKINSAQDLIKNKEHVLLKAKIIGYGNVSLGTNSISNVNLIEQFKERLALYNNNNRMDICVVRNTDDIKACGTAIGNQSMVNNPDNYKYLIGKAWKNIGISKTANGSKISVYYLGNSTPTEKGGNTTNLPTNTTSNVRSANNALAQNAPFAQPSATPNLVAINQHDFGTIESVFELANRSKDIDTLYANSGAQGRDLLQTLLIDSHDAGYARQMIDNTSTGEITKQLNAATTTLNNIASLEHKTSSLQTLSLSNAMILNSRLVNLSRRHTNNIDSFAQRLQALKDQKFASLESAAEVLYQFAPKYEKPTNVWANAIGGTSLNNGGNASLYGTSAGVDAYLNGEVEAIVGGFGSYGYSSFNNQANSLNSGANNTNFGVYSRIFANQHEFDFEAQGALGSDQSSLNFKSALLRDLNQSYNYLAYSAATRASYGYDFAFFRNALVLKPSVGVSYNHLGSTNFKSNSNQVALKNGSSSQHLFNASANVEARYYYGDTSYFYMNAGVLQEFANFGSSNAVSLNTFKVNAAHNPLSTHARVMMGGELKLAKEVFLNLGFVYLHNLISNIGHFASNLGMRYSF

SEQ ID NO: 259 - protein, 174 aa, Artificial Sequence
  Description of Artificial Sequence:  Synthetic Peptide
MPQIQSSHSNHFDFTIDTADRTKLLMSYLVVPTTANFNNVMHGGELLNLLDKVAYVCSTRYCAKGTVTLSVDGVTFKYPIPVGNLLTFLASINYVGNTSCEVGIKVLSEDIKTREITHTNSCYFTMVAVENGKPTPMPKYEPKTEVEIRRYEGALKRKEMRTRGYLKSGKHEGV

SEQ ID NO: 260 - protein, 379 aa, Artificial Sequence
  Description of Artificial Sequence:  Synthetic Peptide
LNNLDIKTLGQVFTPKKIVDFMLTLKHNHGSVLEPSAGDGSFLKRLKKAVRIEIDPKICPKNALCMDFFDYPLENQFDTIIGNPPYVKHKDIAPSTKEKLHYSLFDERSNLYLFFIEKAIKHLKPKGELIFITPRDFLKSTSSVKLNEWIYKEGTITHFFELGDQKVFPNAMPNCVIFRFCKGNFSRITNDGLQFLCKKGILYFLNQSYTQKLSEVFKVKVGAVSGCDKIFKNEKYGNLEFVTSITKRTNALEKMVFVNEPNDYLLQHKDSLMQRKIKKFNENNWFEWGRMHHISPKKRIYVNAKTHQKNPFFIHQCPNYDGSILALFPYNQNLDLQNLCDKLNAINWQELGFVCGGRFLFSQRSLENALLPKDFLNLG

SEQ ID NO: 261 - protein, 529 aa, Artificial Sequence
  Description of Artificial Sequence:  Synthetic Peptide
MKQNLKPFKMIKENLMTQSQKVRFLAPLSLALSLSFNPVGAEEDGGFMTFGYELGQVVQQVKNPGKIKAEELAGLLNSNTTNNTNTNIAGTGGNVAGTLGNLFMNQLGNLIDLYPILNTKNIHQCGTTNNGSSSATTAAATTNNGLCFQGNLDLYNEMVGSIKTLSQNISKNIFQGNNNTTSQNLSNQLSELNTASVYLTYMNSFLNANNQAGGIFQNNTNQAYGNGVTAQQIAYILKQASITMGPSGDSGAAAAFLDAALAQHVFNSANAGNDLSAKEFTSLVQNIVNNSQNALTLANNANISNSTGYQVSYGGHIDQARSTQLLNNTTNTLAKVTALNNELKANPWLGNFAAGNSSQVNAFNGFITKIGYKQFFGENKNVGLRYYGFFSYNGAGVGNGPTYNQVNLLTYGVGTDVLYNVFSRSFGSRSLNAGFFGGIQLAGDTYISTLRNSPQLANRPTATKFQFLFDVGLRMNFGILKKDLKSHNQHSIEIGVQIPTIYNTYYKAGGAEVKYFRPYSVYWVYGYAF

SEQ ID NO: 262 - protein, 2529 aa, Artificial Sequence
  Description of Artificial Sequence:  Synthetic Peptide
MAFKKARLISKFISKGSFKLNKISKKIFTLNQILKCEKPLKRHKKALKPIKKLSNRNKSFLKASVLLIGALGGLSHLRANECRYWSWSSWSYQDNIESGPNSPTHNSYCLFSSTQGSGTYYLNTLTTYSAGGASFTQKFNNGTLNVGENIRFGGTGINGGDVGYITGTYDAQTINFNSSHLTTGNSYADGGGATLNFNAANNITINQASFDNSHAGTQKSYMNFKGSNIKVSGSSFTDDTDGGFSFSGNSNNSTISFNQTSFNQGTYHFSNSATLSFNHSAFNQGTYNFNSTQSAFNNSAFNQGTYHFNGNASFDNDTFNQGTYSFNTSKVSFSGINTLNSSSPFASLKGSVSFGSDAIFNLNQTLNNQTYDILTTNGAIQYGVYQSYLWDLINYKGDKAISHVEVGNNTYDVTFDINGQDETLQETFNKQSIITQFLGDDLQQQAQKTYQQDLSNSQSALNNAASDNKIANSDTDYTKNKNATIKKDAQGLENTNQQIAQDEQALQGDLDKLKQLANSPTGFSEQAFNQAQKQEQQDEQTLQNEEKTFNSEQEGLKQAIQQAQAQQQKQQQKQEQQQAQQTYQEDLTHSQSALNDVASDNTIASNDTNYTNNQNTAIKEDAQGLENTNQQIAQDEQALQGDLDKLKQLANSPTGFSEQAFNQAQKQEQQDEQTLQNEEKTFNSEQERLKQAIANAKPTSPTPSHAPTPTKHTAPNTPPNKVPPTPPTQNPPAESVWSGVYWLQNKTYSNKGIYYIDPNLSGQSGQSGNTLSTYTANLFGRSFSVNIQNGTLIIGNNTESVNSNGLIWIGHGGFGYITGTFSAANIYLTNNFKTGEGVSNSDGGGANITFKASDNITMDGLNYNDAETVTKMIQTGASQHSYATFDALNNISVTNSSFSDMTWGKFSFSAKNISFSNASFSGFTNPGGSSVISANATNSLSFINSRLNGGAVYNLQANSLIFNNTQAVFNVLYSRGTSNFNATTQLLGNTNFTLSSQSLLNFNGDTTLQNNANITLGNKSQAAFKNSLTLDNNSNLSLDNQSVLNANNTSAFNNQASLNIYNGSQATFNSLFFNGGTLSLNASSKLNASNASFSNNTTINLDDSVLSASNTSSLNANINFQGASQADFGGNTIIDTASFNFDSASSLNFNNLTANGALNFNGYTPSLTKALMSVSGQFVLGNNGDINLSDINIFDNITKSVTYNILNAQKGITGISGANGYEKILFYGMKIQNATYSDNNNIQTWSFINPLNSSQIIQESIKNGDLTIEVLNNPNSASNTIFNIAPELYNYQASKQNPTGYSYDYSDNQAGTYYLTSNIKGLFTPKGSQTPQAPGTYSPFNQPLSSLNIYNKGFSSENLKTLLGILSQNSATLKEMIESNQLDNITNINEVLQLLDKIKITQVQKQALLETINHLTDNINQTFNNGNLIIGATQDNVTNSTSSIWFGGNGYSSPCTLDSATCSSFRNTYLGQLLGSTSPYLGYINADFKAKSIYITGTIGSGNAFESGGSADVTFQSANNLVLNKANIEAQATDNIFNLLGQKGIEKIFNQGNLANVLSQVAMEKIKQAGGLGNFIENALSPLSKELPASLQNETLGQLIGQNNLDDLLNNSGVMNAIQNIISKKLSIFGNFVTPSIIENYLAKQSLKSMLDDKGLLNFIGGYMNASELSSILSVVLKDITNPPTSLQKDIGVVANDLLNEFLGQDVIKKLESQGLVSNIINNIISQGGLSGVYNQGLGSVLPPSLQNALKENDLGTLLSPRGLHDFWQKGYFNFLSNGYVFVNNSSFSNATGGSLNFVANKSIIFNGDNTIDFSKYQGALIFASNDVSNINITTLNATNGLSLNAGLNNVSVQKGEICVNLANCPTTKNSSSTNSSVTPTNESLSVRANNFTFLGAIASNGAIDLSQVKNNSVIDTLNLNENAALQANNLTITNAFNNASNSTANINGNFTLNQQATLSTNASGLNVMGNFNSYGDLVFNLSHSVSHAIINAQGSATIMANNNNPLIQFNTSSKEVGTYTLIDSAKAIYYGYNNQITGGSSLDNYLKLYTLIDINGKHMVMTDNGLTYNGQAVSVKDGGLVVGFKDSQNQYIYTSILYNKVKIAVSNDPINNLQAPTLKQYIAQIQGTQGVDSIDQAGGSQAINWLNKIFETKGSPLFAPYYLESHSTKDLTTIAGDIANTLEVIANPNFKNDATNILQINTYTQQMSRLAKLSDTSTFASADFHERLEALKNKRFADAIPNAMDVILKYSQRNRVKNNVWATGVGGASFINGGTGTLYGINVGYDRFIKGVIVGGYAAYGYSGFHANITQSGSSNVNMGVYSRAFIKRSELTMSLNETWGYNKTFINSYDPLLSIINQSYKYDTWTTDAKINYGYDFMFKDKSVIFKPQIGLAYYYIGLSGLRGIMDDPIYNQFRANADPNKKSVLTINFALESRHYFNKNSYYFVIADVGRDLFINSMGDKMVRFIGNNTLSYRDGGRYNTFASIITGGEIRLFKTFYVNAGIGARFGLDYKDINITGNIGMRYAF

SEQ ID NO: 263 - protein, 193 aa, Artificial Sequence
  Description of Artificial Sequence:  Synthetic Peptide
MNTYKNSLNHFLNLVDCLEKIPNVGKKSAFKMAYHLGLENPYLALKITHALENALENLKTCSSCNALSESEVCEICSDESRQNSQLCMVLHPRDVFILEDLKDFLGRYYVLNSIEEVDFNALEKRLIEENIKEIIFAFPPTLANDSLMLYIEDKLQHFHLTFTKIAQGVPTGVNFENIDSVSLSRAFNSRIKA

SEQ ID NO: 264 - protein, 188 aa, Artificial Sequence
  Description of Artificial Sequence:  Synthetic Peptide
LFKRMVLIALLGVFSSVSLSAKSLLRDDGILVSDLKGMKSELSDAPAWVFEDAKAPYEEMGVAYIPVNNKYLGIEQATLNAKLSLIVVFHEIMMKYKKRFMEQFHESEQTTTNISYAIYNYLATKIQVSNTYTNLKSEVAVVKIKLVGCQIEQIKRYLKASVENLNDNEIAYIAKVAQKEFGSVCALR

SEQ ID NO: 265 - protein, 353 aa, Artificial Sequence
  Description of Artificial Sequence:  Synthetic Peptide
LKHLTPLTHTIFKALWLGTALSASLSLAATESPTKTEPKPAKGVKNKPKSPVTKVMMTNCDNIKDFNAKQKEVLKAAYQFGSKENLGYEMAGIAWKESCAGVYKINFSDPSAGVYHSYIPSVLKSYGHNDSPFLRNVMGELLIKDDAFASEVALKELLYWKTRYHDNLKDMIKSYNKGSRWERSEKSNADAEKYYEEIQDRIRRLKESKIFDSQSSNDQELQKSANSNLDLDPIGNAMPQALIAKETKIEETQAEKSQEMKETTSEQTKSKPEKAKDKPMYLAQINSTDFTPVKKSPKKPAKVSQKHSFKNNIKNNVKNNAKTASKKQEMCKNCSPGQRNAILANHITLMQEL

SEQ ID NO: 266 - protein, 487 aa, Artificial Sequence
  Description of Artificial Sequence:  Synthetic Peptide
MIEWMQNHRKYLVVTIWISTIAFIAAGMIGWGQYSFSLDSDSAAKVGQIKISQEELAQEYRRLKDAYAESIPDFKELTKDQIKAMHLEKSALDSLINQALLRNLALDLGLGATKQEVAKEIRKTSVFQKDGVFDEELYKNILKQSHYRPKHFEESVERLLILQKISTLFPKTTTPLEQSSLSLWAKLQDKLDILILNPSDVKISLNEEEMKKYYESHKKDFKKPTSFKTRSLYFDASLEKPDLKELEEYYHKNKVSYLDKEGKLQDFKSVQEQVKHDLSMQKANEKALRSYIALKKANAQNYTTQDFEENNSPYTAEITQKLTALKPLEILKPEPFKDGFIVVQLISQIKDELQNFNEAKSALKTRLTQEKTLMALQTLAKEKLKDFKGKSVGYVSPNFGGTISELNQEESAKFINALFNRQEKKGFIAINNKVVLYQITEQNFNHSFSAEESQYMQRLVNNTKTDFFDKALIEELKKRYKIVKYIQ

SEQ ID NO: 267 - protein, 443 aa, Artificial Sequence
  Description of Artificial Sequence:  Synthetic Peptide
VSPLKTIRIYSYHDSIKDSIKAVVNISTEKKIKNNFIGGGVFNDPFFQQFFGDLGGMIPKERMERALGSGVIISKDGYIVTNNHVIDGADKIKVTIPGSNKEYSATLVGTDSESDLAVIRITKDNLPTIKFSDSNDISVGDLVFAIGNPFGVGESVTQGIVSALNKSGIGINSYENFIQTDASINPGNSGGALIDSRGGLVGINTAIISKTGGNHGIGFAIPSNMVKDTVTQLIKTGKIERGYLGVGLQDLSGDLQNSYDNKEGAVVISVEKDSPAKKAGILVWDLITEVNGKKVKNTNELRNLIGSMLPNQRVTLKVIRDKKERAFTLTLAERKNPNKKETISAQNGAQGQLNGLQVEDLTQETKRSMRLSDDVQGVLVSQVNENSPAEQAGFRQGNIITKIEEVEVKSVADFNHALEKYKGKPKRFLVLDLNQGYRIILVK

SEQ ID NO: 268 - protein, 288 aa, Artificial Sequence
  Description of Artificial Sequence:  Synthetic Peptide
MSKSLYQTLNVSENASQDEIKKSYRRLARQYHPDLNKTKEAEEKFKEINAAYEILSDEEKRRQYDQFGDNMFGGQNFSDFARSRGPSEDLDDILSSIFGKGGFSQRFSQNSQGFSGFNFSNFAPENLDITAALNVSVLDTLLGNKKQVSINNETFSLKIPIGVEEGEKIRVRNKGKTGRTTRGDLLLEIHIEEDEMYRREKDDITQIFDLPLKTALFGGKIEIATWHKTLTLTIPPNTKAMQKFRIKEKGIKNRKTSHVGDLYLQARLILPKTETLSNELKALLEKEL

SEQ ID NO: 269 - protein, 295 aa, Artificial Sequence
  Description of Artificial Sequence:  Synthetic Peptide
MKQTTINHSVELVGIGLHKGVPVKLVLEPLGENQGIVFYRSDLGVNLPLKPENIVDTKMATVLGKDNARISTIEHLLSAVHAYGIDNLKISVDNEEIPIMDGSALTYCMLLDEAGIKELDAPKKVMEIKQAVEIRESDKFVKIEPDSQLSLNFTIDFNHPVIAKQAHHFVFSKTAYKEQVAKARTFGFLQEVNYLRSIGLAKGGSLNNCIVLDENSILNKEGLRCEKEFVCHKILDAMGDLMVLGMPVMGKYTSFSGSHKLNSMLVKAILADAKNYEVLIAADPAKEFALQKAFA

SEQ ID NO: 270 - protein, 858 aa, Artificial Sequence
  Description of Artificial Sequence:  Synthetic Peptide
VQPMKSKKLYLALIIGVLLAFLTLSSWLGNSGLVGRFGVWFAALNKKYFGHLSFINLPYLAWVLFLLYKTKNPFTEIVLEKTLGHLLGILSLLFLQSSLLNQGEIGNSARLFLRPFIGDFGLYALITLMVVISYLILFKLPPKSVFYPYMNKTQNLLKEIYKQCLQAFSPNFSPKKEGFENTPSDIQKKETKNDKEKENRKENPINENHKTPNEEPFLAIPTPYNTTLNDSEPQEGLVQISSHPPTHYTIYPKRNRFDDLTNPTNPPLKEIKQETKEREPTPTKETLTPTTPKPIMPTLAPIIENDNKTENQKTPNHPKKEENPQENTQEEMIEGRIEEMIKENLKKEEKEVQNAPNFSPVTPTSAKKPVMVKELSENKEILDGLDYGEVQKPKDYELPTTQLLNAVCLKDTSLDENEIDQKIQDLLSKLRTFKIDGDIIRTYSGPIVTTFEFRPAPNVKVSRILGLSDDLAMTLCAESIRIQAPIKGKDVVGIEIPNSQSQIIYLREILESELFQKSSSPLTLALGKDIVGNPFITDLKKLPHLLIAGTTGSGKSVGVNAMILSLLYKNPPDQLKLVMIDPKMVEFSIYADIPHLLTPIITDPKKAIGALQSVAKEMERRYSLMSEYKVKTIDSYNEQAPSNGVEAFPYLIVVIDELADLMMTGGKEAEFPIARIAQMGRASGLHLIVATQRPSVDVVTGLIKTNLPSRVSFRVGTKIDSKVILDTDGAQSLLGRGDMLFTPPGANGLVRLHAPFATEDEIKKIVDFIKAQKEVQYDKDFLLEESRMPLDTPNYQGDDILERAKAVILEKKITSTSFLQRQLKIGYNQAATITDELEAQGFLSPRNAKGNREILQNF

SEQ ID NO: 271 - protein, 290 aa, Artificial Sequence
  Description of Artificial Sequence:  Synthetic Peptide
MLENVKKSFFRVLCLGALCLGGLMAEQDPKELVGLGAKSYKEKDFTQAKKYFEKACDLKENSGCFNLGVLYYQGQGVEKNLKKAASFYAKACDLNYSNGCHLLGNLYYSGQGVSQNTNKALQYYSKACDLKYAEGCASLGGIYHDGKVVTRDFKKAVEYFTKACDLNDGDGCTILGSLYDAGRGTPKDLKKALASYDKACDLKDSPGCFNAGNMYHHGEGATKNFKEALARYSKACELENGGGCFNLGAMQYNGEGVTRNEKQAIENFKKGCKLGAKGACDILKQLKIKV

SEQ ID NO: 272 - protein, 957 aa, Artificial Sequence
  Description of Artificial Sequence:  Synthetic Peptide
VKLPKALNEATAGAALKYHIKRALERSHSISDFSKNLELSTQKSHFSNNTLKIIEELNNGVKQASEEIKEKARDFSNQKLTNEQIKDLLNNAEIPTSGRDAITFGVNNLNPEIVEFLHKNNKKMIIEKASNKELELLKDANFKHPENIRASLDHDAIAHILKRHGVNSVNVRNGEIPITNEDIANYRYIVNNADAILRTLDNENKELISAFKQINGYAVVVEQAINKKNELVLKTMYKSKGDYKDNNAYKKFSSTHTLNADAKVNHRLSSYSGATENTTQKDLIDQENLLKTSENLNESTPKPTNLSPLEQANAEKLAKLESEKLESEKEFLKAKEQEATRKAALKKKLEHERGNAGNIESQTKIEVGEDIPTQTQAQLPKSRVRLNEREIYDLDYAIVKAKDLKPSFTTGGTQKRTDMNEEQIKSIAENFDPKKIFGSGGFEDLPIILHDGQVIAGNHRIQGMLNFTPKSRFSYERAIKEYYHIDLKPDELLVRVPHKRLNNTEINNLAASSNQGRFNSESDHAIAVLSHYEAKLKELDQKLDADSIYSLKNIVAKNLNFDKATHPNVTDSNLALLMFNMPRTKTQGIELLNRWKKEFSNDIKSYEKVKKMFVDNAGSFHNLIHDLNFPKVSLNAYLSDIMDRSFANLKNYQSTSESLKDLSEKFYKTSSLEMFEKSDQSTSDISEILGGAIARFARFDDPSKALFEALRSDNIKKGLKDYKIADVTKDMFNADSKEFKDIDIYDFTHYLLMVNREPNENNPILKRLIEAVKDMQKESEKGIKQKLETPSEWGHNYSEFKGDGLGAINKLLETKKGFVAGAFHKEGLGDIDLVYGNSKYGLEHIFNRRESDAIDKGMSKEEAKKYALKIINNIPNIISNGKLSKDNLGRLSIEFENQRVGLNDSWKGETLNNRWVITSYEIDKSRNGLIESPLAPNYKGKDTNPLNLDSPNPTTKN

SEQ ID NO: 273 - protein, 256 aa, Artificial Sequence
  Description of Artificial Sequence:  Synthetic Peptide
MGYASKLALKICLASLCLFSALGAEHLEQKRNYIYKGEEAYNNKEYERAASFYKSAIKNGEPLAYVLLGIMYENGRGVPKDEKKAAEYFQKAVDNDIPRGYNNLGVMYKEGRGVPKDEKKAVEYFRIATEKGYTNAYINLGIMYMEGRGVPSNYVKATECFRKAMHKGNVEAYILLGDIYYSGNDQLGIEPDKDKAIVYYKMAADMSSSRAYEGLAESYQYGLGVEKDKKKAEEYMQKACDFDIDKNCKKKNTSSR

SEQ ID NO: 274 - protein, 606 aa, Artificial Sequence
  Description of Artificial Sequence:  Synthetic Peptide
MGGILSSLNTSYTGLQAHQSMVDVTGNNISNASDEFYSRQRVIAKPQAAYMYGTKNVNMGVDVEAIERVHDEFVFARYTKANYENTYYDTEFSHLKEASAYFPDIDEASLFTDLQDYFNSWKELSKNAKDSAQKQALAQKTEALTHNIKDTRERLTTLQHKASEELKSVIKEVNSLGSQIAEINKRIKEVENNKSLKHANELRDKRDELEFHLRELLGGNVFKSSIKTHSLTDKDSADFDESYNLNIGHGFNIIDGSIFHPLVVKESENKGGLNQVYFQSDDFKVTNITDKLNQGRVGALLNVYNDGSNGTLKGKLQDYIDLLDSFAKGLIESTNAIYAQSASHYIEGEPVEFNSDEAFKDTNYNIKNGSFDLIAYNTDGKEIARKTIAITPITTMNDIIQAINANTDDNQDNNTENDFDDYFTAGFNNETKKFVIQPKNASQGLFVSMKDNGTNFMGALKLNPFFQGDDASNISLNKEYKKEPTTIRPWLAPINGNFDVANMMQQLQYDSVDFYNDKFDIKPMKISEFYQFLTGKINTDAEKSGRILDTKKSMLETIKKEQLSISQVSVDEEMVNLIKFQSGYAANAKVITAIDRMIDTLLGIKQ

SEQ ID NO: 275 - protein, 417 aa, Artificial Sequence
  Description of Artificial Sequence:  Synthetic Peptide
MRYLWLFLIHTIGLFATDKTLDIIKTIQKLPKIEVRYSIDNDANYALKLHEVLANDLKTSQHFDVSQNKDQGAINYAELKDKKVHLVALVSVAVENGNKISRLKLYDVDTGTLKKTFDYPIVSLDLYPFAAHNMAIVVNDYLKAPSIAWMKRLIVFSKYIGPGITNIALADYTMRYQKEIIKNNRLNIFPKWANAEQTEFYYTQYGERTPMILKYNIQKATHENIASSQGMAVVSSVSSDGSKILMSLAPDGQPDVYLYDTHKKTKTKITRYPGIDVSGVFLEDDKSMAFVSDRSGYPNIYMKKLGLKESAEQLLYEGRSNESIDAYKDSIVYVSRENLNEFGKTVFNLNLITLNSKYIRRLTVNGSNQMPRFSTDGRNIMYIKKTPQEYAMGLILLDYNQSFLFPLKNVKIQAFDW

SEQ ID NO: 276 - protein, 448 aa, Artificial Sequence
  Description of Artificial Sequence:  Synthetic Peptide
MFQALSDGFKNALNKIRFQDDEKALDRALDELKKTLLKNDVHHKVARELLKKVESQTKLNGIGKQQFLDALEKSLLEILSAKGSSGFTFAQTPPTVVLMAGLQGSGKTTTTAKLAHYLKTKNKKVLLCACDLQRLAAVEQLKVLGEQVGVEVFYEENKSVKEIASNALKRAKEAQFDVLLVDSAGRLAIDKELMQELKEVKEILNPHEVLYVADALSGQDGVKSANTFNEEIGVSGVVLSKFDSDSKGGIALGITYQLGLPLRFIGSGEKIPDLDVFVPERIVGRLMGAGDIVSLAEKTASVLNPNEAKDLSKKLKKGQFTFNDFLNQIEKVKKLGSMSSLISMIPGLGNMASALKDTDLESSLEVKKIKAMVNSMTKKEQENPEILNGSRRKRIALGSGLEVSEINRIIKRFDQASKMAKRLTNKKGISDLMNLMSQAKNQTPPKMR

SEQ ID NO: 277 - protein, 874 aa, Artificial Sequence
  Description of Artificial Sequence:  Synthetic Peptide
MIMKQEPTTYQPEEIEKKIYEICSHRGYFEIDGNEAIQEKNKRFCLMMPPPNVTGVLHIGHALTLSLQDILARYKRMDGYKTLYQPGLDHAGIATQNVVEKQLLSQGIKKEDLGREEFIKKVWEWKEKSGGAILEQMKRLGVSAAFSRTRFTMDKGLQRAVKLAFLKWYEKGLIIQDNYMVNWCTKDGALSDIEVEYEERKGALYYIRYYLENQKDYLVVATTRPETLFGDSALMVNPNDERYKHLVGQKAILPLIHRTIPIIADEHVEMEFGTGCVKVTPGHDFNDYEVGKRHHLETIKIFDEKGILNAHCGEFENLERLEARDKVVERLKENALLEKIEEHTHQVGHCYRCHNVVEPYVSKQWFVKPEIAQSSIEKIQQGLARFYPSNWINNYNAWMRELRPWCISRQLFWGHQIPVFTCENNHQFVSLDTPLSCPTCKSETLEQDKDVLDTWFSSGLWAFSTLGWGQEKSGLFNESDLKDFYPNTTLITGFDILFFWVARMLFCSESLLGELPFKDIYLHALVRDEKGEKMSKSKGNVIDPLEMIEKYGADSLRFTLANLCATGRDIKLSTTHLENNKNFANKLFNAASYLKLKQESFKDKERLNEYQTPLGRYAKSRLNSATKEARNALDNYRFNDATTLLYRFLWGEFCDWFIEFSKVENEAIDELGSVLKEALKLLHPFMPFISESLYHKLSNTELENTESIMVMPYPKDLAQDEKLEHEFEVIKDCIVSLRRLKIMLETPPIVLKEASVGLREAIENTERLQTYAQKLARLEKVSVISSKPLKSVSDVGEFCQTYANLENLDLSPLVARLKKQLEKLEKEKLKLNLHNENFVKNAPKSVLEKAKESLKTLLEKESKIKQELDLLEQP

SEQ ID NO: 278 - protein, 202 aa, Artificial Sequence
  Description of Artificial Sequence:  Synthetic Peptide
MKKTFLIALALTASLVGAENTKWDYKNKENGPHRWDKLHKDFEVCKSGKSQSPINIEHYYHTQDKADLQFKYAASKPKAVFFTHHTLKASFEPTNHINYRGHDYVLDNVHFHAPMEFLINNKTRPLSAHFVHKDAKGRLLVLAIGFEEGKENPNLDPILEGIQKKQNFKEVALDAFLPKSINYYHLTALSPLLLAQRGWHGL

SEQ ID NO: 279 - protein, 2890 aa, Artificial Sequence
  Description of Artificial Sequence:  Synthetic Peptide
MSKKIPLKNRLRADFTKTPTDLEVPNLLLLQRDSYDSFLYSKEGKESGIEKVFKSIFPIQDEHNRITLEYAGCEFGKSKYTVREAMERGITYSIPLKIKVRLILWEKDTKSGEKNGIKDIKEQSIFIREIPLMTERTSFIINGVERVVVNQLHRSPGVIFKEEESSTSLNKLIYTGQIIPDRGSWLYFEYDSKDVLYARINKRRKVPVTILFRAMDYQKQDIIKMFYPLVKVRYENDKYLIPFASLDANQRMEFDLKDPQGKVILLAGKKLTSRKIKELKENHLEWVEYPMDILLNRHLAEPVMVGKEVLLDMLTQLDKNKLEKIHDLGVQEFVIINDLALGHDASIIQSFSADSESLKLLKQTEKIDDENALAAIRIHKVMKPGDPVTTEVAKQFVKKLFFDPERYDLTMVGRMKMNHKLGLHVPDYITTLTHEDIITTVKYLMKIKNNQGKIDDRDHLGNRRIRAVGELLANELHSGLVKMQKTIKDKLTTMSGAFDSLMPHDLVNSKMITSTIMEFFMGGQLSQFMDQTNPLSEVTHKRRLSALGEGGLVKDRVGFEARDVHPTHYGRICPIETPEGQNIGLINTLSTFTRVNDLGFIEAPYKKVVDGKVVGETIYLTAIQEDSHIIAPASTPIDEEGNILGDLIETRVEGEIVLNEKSKVTLMDLSSSMLVGVAASLIPFLEHDDANRALMGTNMQRQAVPLLRSDAPIVGTGIEKIIARDSWGAIKANRAGVVEKIDSKNIYILGESKEEAYIDAYSLQKNLRTNQNTSFNQVPIVKVGDKVGAGQIIADGPSMDRGELALGKNVRVAFMPWNGYNFEDAIVVSECITKDDIFTSTHIYEKEVDARELKHGVEEFTADIPDVKEEALAHLDESGIVKVGTYVSAGMILVGKTSPKGEIKSTPEERLLRAIFGDKAGHVVNKSLYCPPSLEGTVIDVKVFTKKGYEKDARVLSAYEEEKAKLDMEHFDRLTMLNREELLRVSSLLSQAILEEPFSHNGKDYKEGDQIPKEEIASINRFTLASLVKKYSKEVQNHYEITKNNFLEQKKVLGEEHEEKLSILEKDDILPNGVIKKVKLYIATKRKLKVGDKMAGRHGNKGIVSNIVPVADMPYTADGEPVDIVLNPLGVPSRMNIGQILEMHLGLVGKEFGKQIARMLEDKTKDFAKELRAKMLEIANAINEKDPLTIHALENCSDEELLEYAKDWSKGVKMAIPVFEGISQEKFYKLFELAKIAMDGKMDLYDGRTGEKMRERVNVGYMYMIKLHHLVDEKVHARSTGPYSLVTHQPVGGKALFGGQRFGEMEVWALEAYGAAHTLKEMLTIKSDDIRGRENAYRAIAKGEQVGESEIPETFYVLTKELQSLALDINIFGDDVDEDGAPKPIVIKEDDRPKDFSSFQLTLASPEKIHSWSYGEVKKPETINYRTLKPERDGLFCMKIFGPTKDYECLCGKYKKPRFKDIGTCEKCGVAITHSKVRRFRMGHIELATPVAHIWYVNSLPSRIGTLLGVKMKDLERVLYYEAYIVKEPGEAAYDNEGTKLVMKYDILNEEQYQNISRRYEDRGFVAQMGGEAIKDLLEEIDLITLLQSLKEEVKDTNSDAKKKKLIKRLKVVESFLNSGNRPEWMMLTVLPVLPPDLRPLVALDGGKFAVSDVNELYRRVINRNQRLKRLMELGAPEIIVRNEKRMLQEAVDVLFDNGRSTNAVKGANKRPLKSLSEIIKGKQGRFRQNLLGKRVDFSGRSVIVVGPNLKMDECGLPKNMALELFKPHLLSKLEERGYATTLKQAKRMIEQKSNEVWECLQEITEGYPVLLNRAPTLHKQSIQAFHPKLIDGKAIQLHPLVCSAFNADFDGDQMAVHVPLSQEAIAECKVLMLSSMNILLPASGKAVAIPSQDMVLGLYYLSLEKSGVKGEHKLFSSVNEIITAIDTKELDIHAKIRVLDQGNIIATSAGRMIIKSILPDFIPTDLWNRPMKKKDIGVLVDYVHKVGGIGITATFLDNLKTLGFRYATKAGISISMEDIITPKDKQKMVEKAKVEVKKIQQQYDQGLLTDQERYNKIIDTWTEVNDKMSKEMMTAIAQDKEGFNSIYMMADSGARGSAAQIRQLSAMRGLMTKPDGSIIETPIISNFKEGLNVLEYFNSTHGARKGLADTALKTANAGYLTRKLIDVSQNVKVVSDDCGTHEGIEITDIAVGSELIEPLEERIFGRVLLEDVIDPITNEILLYADTLIDEEGAKKVVEAGIKSITIRTPVTCKAPKGVCAKCYGLNLGEGKMSYPGEAVGVVAAQSIGEPGTQLTLRTFHVGGTASRSQDEREIVASKEGFVRFYNLRTYTNKEGKNIIANRRNASILVVEPKIKAPFDGELRIETVYEEVVVSVKNGDQEAKFVLRRSDIVKPSELAGVGGKIEGKVYLPYASGHKVHKGGSIADIIQEGWNVPNRIPYASELLVKDNDPIAQDVYAKEKGVIKYYVLEANHLERTHGIKKGDMVSEKGLFAVIADDNGREAARHYIARGSEILIDDNSEVSTNSVISKPTTNTFKTIATWDPYNTPIIADFKGKVGFVDVIAGVTVAEKEDENTGITSLVVNDYIPSGYKPSLFLEGANGEEMRYFLEPKTSIAISDGSSVEQAEVLAKIPKATVKSRDITGGLPRVSELFEARKPKPKDVAILSEVDGIVSFGKPIRNKEHIIVTSKDGRSMDYFVDKGKQILVHADEFVHAGEAMTDGVISSHDILRISGEKELYKYIVSEVQQVYRRQGVSIADKHIEIIVSQMLRQVRILDSGDSKFIEGDLVSKKLFKEENARVIALKGEPAIAEPVLLGITRAAIGSDSIISAASFQETTKVLTEASIAMKKDFLEDLKENVVLGRMIPVGTGMYKNKKIVLRALEDNSKF

SEQ ID NO: 280 - protein, 399 aa, Artificial Sequence
  Description of Artificial Sequence:  Synthetic Peptide
MAKEKFNRTKPHVNIGTIGHVDHGKTTLSAAISAVLSLKGLAEMKDYDNIDNAPEEKERGITIATSHIEYETENRHYAHVDCPGHADYVKNMITGAAQMDGAILVVSAADGPMPQTREHILLSRQVGVPHIVVFLNKQDMVDDQELLELVEMEVRELLSAYEFPGDDTPIVAGSALRALEEAKAGNVGEWGEKVLKLMAEVDAYIPTPERDTEKTFLMPVEDVFSIAGRGTVVTGRIERGVVKVGDEVEIVGIRPTQKTTVTGVEMFRKELEKGEAGDNVGVLLRGTKKEEVERGMVLCKPGSITPHKKFEGEIYVLSKEEGGRHTPFFTNYRPQFYVRTTDVTGSITLPEGVEMVMPGDNVKITVELISPVALELGTKFAIREGGRTVGAGVVSNIIE

SEQ ID NO: 281 - protein, 405 aa, Artificial Sequence
  Description of Artificial Sequence:  Synthetic Peptide
VLIVQKYGGTSMGSIERIHNVAQRVLESVTLGHQVVVVVSAMSGETDRLLEFGKNFSHNPNKREMDRIVSVGELVSSAALSMALERYGHRAISLSGKEAGILTSSHFQNAVIQSIDTKRITELLEKNYIVVIAGFQGADIQGETTTLGRGGSDLSAVALAGALKAHLCEIYTDVDGVYTTDPRIEEKAQKIAQISYDEMLELASMGAKVLLNRSVELAKKLSVKLVTRNSFNHSEGTLIVAEKDFKGERMETPIVSGIALDKNQARVSMEGVEDRPGIAAEIFGALAEYRINVDMIVQTIGRDGKTDLDFTIVKTQIEETKQALKPFLAQMDSIDYDENIAKVSIVGVGMKSHSGVASIAFKALAKDNINIMMISTSEIKISVLIDIKYAELAVRTLHAVYQLDQ

SEQ ID NO: 282 - protein, 733 aa, Artificial Sequence
  Description of Artificial Sequence:  Synthetic Peptide
MKKHILSLALGSLLVSTLSAEDDGFYTSVGYQIGEAAQMVTNTKGIQQLSDNYENLNNLLTRYSTLNTLIKLSADPSAINAVRENLGASAKNLIGDKANSPAYQAVLLAINAAVGFWNVVGYVTQCGGNANGQESTSSTTIFNNEPGYRSTSITCSLNGHKPGYYGPMSIENFKKLNEAYQILQTALKNGLPALKENNGKVSVTYTYTCSGQGNNNCSPSVNGTKTTTQTIDGKSVTTTISSKVVGSIASGNTSHVITNKLDGVPDSAQALLAQASTLINTINEACPYFHATNSSEANAPKFSTTTGKICGAFSEEISAIQKMITDAQELVNQTSVINSNEQSTPVGNNNGKPFNPFTDASFAQGMLANASAQAKMLNLAHQVGQAINPENLSENFKNFVTGFLATCNNKSTAGTGGTQGSAPGTVTTQTFASGCAYVEQTLTNLGNSIAHFGTQEQQIQQAENIADTLVNFKSRYSELGNTYNSITTALSKVPNAQSLQNVVSKKNNPYSPQGIETNYYLNQNSYNQIQTINQELGRNPFRKVGIVNSQTNNGAMNGIGIQVGYKQFFGQKRKWGARYYGFFDYNHAFIKSSFFNSASDVWTYGFGADALYNFINDKATNFLGKNNKLSLGLFGGIALAGTSWLNSEYVNLATVNNVYNAKMNVANFQFLFNMGVRMNLARSKKKGSDHAAQHGIELGLKIPTINTNYYSFMGAELKYRRLYSVYLNYVFAY

SEQ ID NO: 283 - protein, 240 aa, Artificial Sequence
  Description of Artificial Sequence:  Synthetic Peptide
LDSFHSFNQHAFNRHAKTYHLFAHIQQQIAICLVQFLKQKHYAKVLDLGSGSGAVFNALERQNILIEEFIALDNSINMLKLHPTHSINIQKISLEHADFEEHVFCTYDLVVSSSSLQWARDLKSVLEKIALSSKEVALAIHTDFSLHEVHEFLGTPSPLRDLKTLKSLIKNAFKHFQIELENKRFALYFNRKQDCLNYLKKCGLLGGSTLSFKQKKHFFQNMAFEKLSYEVLLFSGIKRS

SEQ ID NO: 284 - protein, 328 aa, Artificial Sequence
  Description of Artificial Sequence:  Synthetic Peptide
LSGFNPLNSPLVASSSLSLKEAYYLEKLSLKKGFKIHYKMTKDSLNLLEKSDLCVLFGGFSNACLNENERWILESISHSKRPYALLRPLQDTRDLQENCLFASYEIHTEAAILALILRGILEQTSQLKGHVLEKIDVGYLSSEANMSEEELQELIALIVKAKKRALVLNREITKHANNAFLYTLLSELQNYLEILHIPCYDSSATTAFYDFKDQEWLLETAFKEGILPFKSQLQSKDLELLERISEANGSFVYVSYKSLETPKLSFSKQFKIANKIEHSKAGFQISNQTLECELEENPHLKGLIAILEGAFFDAYPYIPILSHSQGIS

SEQ ID NO: 285 - protein, 500 aa, Artificial Sequence
  Description of Artificial Sequence:  Synthetic Peptide
MISLIEKAPYIPYPLALYEKLEQPHTLLFESAEIESKAHTKSLLMAKACLKLICNHNIVTITSLTPNGGAFLQKLSAFFKTPIQDNALILTYTKNKKTQDEFLKLFEPSPFDALRGLFKSVKTKPKHPFTLLSAGVFSFEMLNFFEDLPHLKAKDNTVHDFIFYLAQNLIIIDHKEKSVEILGACFDERFKTEIAQELQDLKELAKSIKSDFVPKKSKQSREVSANCSDSEFEKRVLSLQEEIKKGEIFQAVLSRSFYMECLEGLSAYYHLKLTNPSPYMFYIKDSDFILFGASPESALKYNALTNTAEIYPIAGTRLRGKDKQGNIDYDLDSKMEFDLQHDYKERAEHIMLVDLARNDMARVSKKRYCDKLLKVDKYSNVMHLVSRVVGELKKGCDSLHAYRSFMNAGTLSGAPKISAIRLIYQLENQRRGSYGGSVGYLNSEGSMDSCITIRSCFVKNNRAVIQAGAGIVLDSVPQNEANETRAKAQALIDAIRKTSL

SEQ ID NO: 286 - protein, 1035 aa, Artificial Sequence
  Description of Artificial Sequence:  Synthetic Peptide
MIEKIIDLSVKNKLLTTLVTLLIFLASLWAIKSVRLDALPDLSPAQVVVQITYPNQSPKIVQEQVTYPLVSTFMSIANIDTVRGISSYESGLIYIIFKDGVNLYWARDRVLEQLNRVSNLPKDAKVEIGSDSTSIGWAYQYALSSDSKNLSDLKVLQDFYYRYALLGVDGVSEVASVGGFVKDYEVTLQNDSLIRYNLSLEQVANAIKNSNNDTGGGVILENGFEKIIRSHGYIQSLKDLEEIVVKKEGAIPLKIKDIASVRLTPKPRRGAANLNGDKEVVGGIVMVRYHADTYKVLKAIKEKIATLQASNPDVKITSVYDRSELIEKGIDNLIHTLIEESVIVLVIIAIFLLHFRSALVVIITLPLSVCISFLLMRYFNIEASIMSLGGIAIAIGAMVDAAIVMVENAHKHLQHIDVKDNAQRVNGIIEGVKHVGGAIFFALMIIVVSFLPIFALTGQEEKLFAPLAYTKTFAMLVGALLSITMVPILMVWLIKGRILEESKNPINAFFMKIYGVSLNVVLKFRYAFLIASVLGLGGLYVAYKKLNWEFIPQINEGVVMYMPVTINGVSIDTALEYLKKSNSAIKRLDFVKQVFGKVGRANTSTDAAGLSMIETYIELKPQNEWKEKLSYKEVRDKLEKTLQLKGLTNSWTYPIRGRTDMLLTGIRTPLGIKLYGNDTDKLQELAILMEQQLKTLKESLSVFAERSNNGYYITLDLNDENLARYGINKKAVLDAIKFALGGATLTTMIKGVENYPISLRLEDTERNTIEKLKNLYIKTAYNYMPLRELARIYYDNSPAVLKSEKGLNVNFIYIVPQNGISSDAYRQLAQKALEKIQLPNGYYYEFSGESQYLEEAFKTLQYIVPVSVFIIFILIVFALKNLTNSLLCFFTLPFAFLGGLIFMNLMGFNMSVAALVGFLALLGVASETAIVMIIYLEDAFQKFIKTPLKEQNSTTLKEAIMHGAVLRVRPKLMTFFSILASLIPIMYSHGTGSEIMKSIAAPMLGGMISSVVLTLFIIPTAYFVIKNAGIKSNQT

SEQ ID NO: 287 - protein, 166 aa, Artificial Sequence
  Description of Artificial Sequence:  Synthetic Peptide
MSVSHVALILRKLFYHRQGVFMGGFSVGMLKDYVDIFVFAVLGVASFLALWFAIERVIFYSKVDLKAYDDIDALNLDLTKNLTILYVIFSNAPYVGLLGTVLGIMVIFYDMGVSGGMDAKTIMVGLSLALKATALGLAVAIPTLIAYNSLLRKSDVLSEKFRIMKK

SEQ ID NO: 288 - protein, 285 aa, Artificial Sequence
  Description of Artificial Sequence:  Synthetic Peptide
MKISPSPRKLSKVSTSVSFLISFALYAIGFGYFLLREDAPEPLAQAGTTKVTMSLASINTNSNTKTNAESAKPKEEPKEKPKKEEPKKEEPKKEVTKPKPKPKPKPKPKPKPKPEPKPEPKPEPKPEPKVEEVKKEEPKEEPKKEEAKEEAKEKSAPKQVTTKDIVKEKDKQEESNKTSEGATSEAQAYNPGVSNEFLMKIQTAISSKNRYPKMAQIRGIEGEVLVSFTINADGSVTDIKVVKSNTTDILNHAALEAIKSAAHLFPKPEETVHLKIPIAYSLKED

SEQ ID NO: 289 - protein, 691 aa, Artificial Sequence
  Description of Artificial Sequence:  Synthetic Peptide
MKKSLLLSLSLIASLSRAEDDGFYTSVGYQIGEAVQQVKNTGALQNLADRYDNLNNLLNQYNYLNSLVNLASTPSAITGAIDNLSSSAINLTSATTTSPAYQAVALALNAAVGMWQVIALFIGCGPGPTNNQSYQSFGNTPALNGTTTTCNQAYGTGPNGILSIDEYQKLNQAYQIIQTALNQNQGGGMPALNDTTKTGVVNIQQTNYRTTTQNNIIEHYYTENGKEIPVSYSGGSSFSPTIQLTYHNNAENLLQQAATIMQVLITQKPHVQTSNGGKAWGLSSTPGNVMDIFGPSFNAINEMIKNAQTALAKTQQLNANENAQITQPNNFNPYTSKDKGFAQEMLNRAEAQAEILNLAKQVANNFHSIQGPIQGDLEECKAGSAGVITNNTWGSGCAFVKETLNSLEQHTAYYGNQVNQDRALAQTILNFKEALNTLNKDSKAINSGISNLPNAKSLQNMTHATQNPNSPEGLLTYSLDSSKYNQLQTIAQELGKNPFRRFGVIDFQNNNGAMNGIGVQVGYKQFFGKKRNWGLRYYGFFDYNHAYIKSNFFNSASDVWTYGVGMDALYNFINDKNTNFLGKNNKLSVGLFGGFALAGTSWLNSQQVNLTMMNGIYNANVSTSNFQFLFDLGLRMNLARPKKKDSDHAAQHGIELGFKIPTINTNYYSFMGAKLEYRRMYSLFLNYVFAY

SEQ ID NO: 290 - protein, 402 aa, Artificial Sequence
  Description of Artificial Sequence:  Synthetic Peptide
MLAKMSFMQNVKNIQEVEVSHKRVLIRVDFNVPLDENLNITDDTRIRESLPTIQYCIDNKAKDIILVSHLGRPKGVEEKLSLKPFLKRLERLLNHEVVFSQNIVQLKQALNENAPTRIFLLENIRFLRGEEENDENLAKDLASLCDVFVNDAFGTSHRKHASTYGTAKFAPIKVSGFLLKKEIDSFYQAFNHPLRPLLLIVGGAKVSSKLTLLKNILDLIDKLIIAGAMSNTFLKALGYDVQDSSVEDALINDALELLQSAKEKKVKVYLPIDAVTTDDILNPKHIKISPVQDIEPKHKIADIGPASLKLFSEVIESAPTILWNGPLGVHEKQEFARGTTFLAHKIADTYAFSLIGGGDTIDAINRAGEKDNMSFISTGGGASLELLEGKILPCFEVLDKRH

SEQ ID NO: 291 - protein, 459 aa, Artificial Sequence
  Description of Artificial Sequence:  Synthetic Peptide
VVLLTMTKRLFKGLLAVSLAVSLHGGEVKEKKPVKPVKEDPQELAAKRVEAFSRFSNVVSEIEKKYVDKISISEIMTKAIEGLLSNLDAHSAYLNEKKFKEFQAQTEGEFGGLGITVGMRDGVLTVIAPLEGTPAYKAGVKSGDNILKINNESTLSMSIDDAINLMRGKPKTPIQITVVRKNEPKPLVFNIIRDIIKLPSVYVKKIKETPYLYVRVSGFDKNVTKSVLEGLKANPKAKGIVLDLRGNPGGLLNQAVGLSNLFIKEGVLVSQKGKNKEENLEYKANGRAPYTNLPIAVLVNGGSASASEIVAGALQDHKRAVIIGEKTFGKGSVQMLLPVNKDEAIKITTARYYLPSGRTIQAKGITPDIVIYPGKVPENENKFSLKEADLKHHLEQELKKIDDKTPNSKEADKDKKNEEEKEITPKMINDDIQLKTAIDSLKTWSIVDEKMDEKAPKKK

SEQ ID NO: 292 - protein, 446 aa, Artificial Sequence
  Description of Artificial Sequence:  Synthetic Peptide
MNETLYCSFCKKPESRDPKKRRIIFASNLNKDVCVCEYCIDVMHGELHKYDNSLLALKRDRLRRMESSAYEEEFLLSYIPAPKELKAVLDNYVIGQEQAKKVFSVAVYNHYKRLSFKEKLKKQDNQDSNVELEHLEEVELSKSNILLIGPTGSGKTLMAQTLAKHLDIPIAISDATSLTEAGYVGEDVENILTRLLQASDWNVQKAQKGIVFIDEIDKISRLSENRSITRDVSGEGVQQALLKIVEGSLVNIPPKGGRKHPEGNFIQIDTSDILFICAGAFDGLAEIIKKRTTQNVLGFTQEKMSKKEQEAILHLVQTHDLVTYGLIPELIGRLPVLSTLDSISLEAMVDILQKPKNALIKQYQQLFKMDEVDLIFEEEAIKEIAQLALERKTGARGLRAIIEDFCLDIMFDLPKLKGSEVRITKDCVLKQAEPLIIAKTHSKILP

SEQ ID NO: 293 - protein, 524 aa, Artificial Sequence
  Description of Artificial Sequence:  Synthetic Peptide
MRDFNNAQITRLKVRQNAVFEKLDLEFKDGLSAISGASGVGKSVLIASLLGAFGLKESNASNIEVELIAPFLDTEEYGIFREDEHEPLVISVIKKEKTRYFLNQTSLSKNTLKALLKGLIKRLSNDRFSQNELNDILMLSLLDGYIQNENKAFSPLLGALEEKFTRLEKLEKERRLLEDKKRFQKDLEERLNFEKMKLERLDLKEDEYERLLEQKKLLSSKEKLNDKIALALEVLENTHKITHALESVGHSAEFLKSALLEASALLEKEQAKLEECERLDIEKVLERLGMLSGIIKDYGSIMHAKERLGHVKNELHNLKEIDSHCETYHKEIERLKTECLKLCEEISGFRKEYLAGFNALLSAKAKDLLLKSPSLVLEDAPMSEKGAQKLVLNLQNSQLETLSSGEYSRLRLAFMLLEMEFLKDFKGVLVLDEMDSNLSGEESLAVSKALETLSSHSQIFAISHQVHIPALAKNHILVFKENHKSLAKTLNNEERVLEIARMIGGSENIESAISFAKEKLKAQE

SEQ ID NO: 294 - protein, 161 aa, Artificial Sequence
  Description of Artificial Sequence:  Synthetic Peptide
MPDELRAEKSFPSKPYDSLKNKSEFDRVYQKGFKKHNPFFSLFVLDLSQEPPKEKAGFKDPLFCRLKDKKTLYLLGLSVSKKVGNAVKRNLIKRRLRSLTLKHAALCQGLALVFVPRSDCYHLDFWALEKHFLEMLTSIKNYMNKALKDLKKGITHTYAKQ

SEQ ID NO: 295 - protein, 746 aa, Artificial Sequence
  Description of Artificial Sequence:  Synthetic Peptide
MLKLASKTICLSLIGSFTAVEAFQKHQKDGFFIEAGFETGLLQGTQTKEQTIATTQEKPKPKPKPKPITPQSTYGKYYISQSTVLKNATELFAEDNITNLTFYSLTPVYVTAYNQESAEEAGYGDSSLIMIQNFLPYNLNNIELSYTDNQGNVVSLGVIETIPKQSQIILPASLFNDPQLNADGFQQLQTATTRFSDASTQNLFDKLSKVTTNLQMTYINYNQFSSGNGSGSKPPCPPYENQENCTAKVPPFTSQDAKNLTNLMLNMMAVFDSKSWEDAVKNAPFQFSDNNLSAPCYSNYSTCVNPYNDGLVDPKLIAKNKGDEYNIENGQTGSVILTPQDVIYSYRVTNNLYVNLLPPRGGDLGLGSQYGGPNGPGDDGTNFGALGILSPFLDPEILFGKELNKVAIMQLRDIIHEYGHTLGYTHNGNMTYQRVRMCEENNGPEERCKGGKIEQVDGQEVQVFDNGHEVRDTDGSFYDVCSRFGGQNQPAFPSSYPNSIYTDCSQVPAGLIGVTSAVWQQLIDQNALPVDYTNLSSQTNYLNASLNTQDFATTMLSAISQSLSSTRSSATTYRTSKTSRPFGAPLLGVNLKMGYQKYFNDYLGLSSYGIIKYNYAQANNEKIQQLSYGVGMDVLFDFITNYTNEKNPKNNLTKKVFTSSLGVFGGLRGLYNSYYLLNQYKGSGNLNVTGGLNYRYKHSKYSVGISVPLVQLKSRVVSSDGATTNSITLNEGGSHFKVFFNYGWIF

SEQ ID NO: 296 - protein, 303 aa, Artificial Sequence
  Description of Artificial Sequence:  Synthetic Peptide
MKKIILACLMAFVGANLSAEPKWYSKAYNKTNTQKGYLYGSGSATSKEASKQKALADLVASISVVVNSQIHIQKSRVDNKLKSSDSQTINLKTDDLELNNVEIVNQEVQKGIYYTRVRINQNLFLQGLRDKYNALYGQFSTLMPKVCKGVFLQQSKSMGDLLAKAMPIERILKAYSVPVGSLENYEKIYYQNAFKPKVQITFDNNGDAEIKSALISAYARVLTPSDEEKLYQIKNEVFTDSANGITRIRVVVSASDCQGTPVLNRSLEVDEKNKNFAITRLQSLLYKELKDYANKEGQGNTGL

SEQ ID NO: 297 - protein, 1211 aa, Artificial Sequence
  Description of Artificial Sequence:  Synthetic Peptide
MKENKAFTHLHLHTEYSLLDGANKIKILAKRVKELGMKSVSVTDHGNMFGAIDFYTSMKKEGIKPIIGMEAYIHNDDNLSSKETKQRFHLCLFAKNQEGYENLMFLSSMAYLEGFYYFPRINKKLLKEHSKGIIASSACLQGEVNYHLNTNNERNRKYGAKGYDEAKKIACEYQEIFEDDFYLEIMRHGILDQRFIDEQVIKMSLETGLKIIATNDTHYTMPNDAKAQEVAMCVAMGKTLNDKGRLKHSVHEFYIKSPEEMAKLFADIPEALENTQEIADKCVLEIDLKDDKKNPPTPPSFKFTKAYAQNEGLNFEDDASYFAYKAREGLKERLVLVPKEKHDQYKERLEKEIEVITNMKFPGYMLIVWDFIRYAKEMGIPVGPGRGSAAGSLVAFALKITDIDPLKYDLLFERFLNPERISMPDIDTDFCQRRRKEIIEYMIEKYGKYNVAQVITFNKMLAKGVIRDVARVLDMPYKEADDFAKLIPNRLGITLKGYEKNGEFIEGAWELEPKIKELVESNELAKQVWEYSLNLENLNRNAGVHAAALVVDSQKELWHKTPLFASEKTGGIVTQYSMKYLEPVDLIKFDFLGLKTLTVIDDALKIIKTQHKISVDFLSLDMDDPKVYKTIQSGDTVGIFQIESGMFQGLNKRLRPSSFEDIIAIIALGRPGPMESGMVDDFVNRKHGVEPIAYAFKELEPILKPTYGTIVYQEQVMQIVQTIGGFSLGEADLIRRAMGKKDAQIMADNKAKFVEGAKNLGHDGQKAANLWDLIVKFAGYGFNKSHSAAYAMITFQTAYLKTYYKHEFMAAMLTSESNKIESVARYIDEVRALEIEVMPPHINSSMQDFSVAEFKNQKGELEKKIVFGLGAIKGVGGEPIKNIIEERAKGDYKSLEDFISRVDFSKLTKKSLEPLVKSGSLDNLGYTRKTMLANLDLICDAGRAKDKANEMMQGGNSLFGAMEGGTKEQVVLDMIDLGEHDAKTLLECEYETLGIHVSGNPLDEFKEEIKGFKNLVKSIDIEELEIGSQAYLLGKIMEVKKKIGKRSGKPYGIADILDRYGKFELMLFEKQLNALEELDINKPLVFKCKIEEQEEVVRLRLFEILDLESAREVKIPKARYKDPEKQKEEVREIPPMEMLASSSCSLAIVLENDVKKEFLRQIKESALKHQGKRPLYLIIKDKDKQFKIQSDLMVNEKIKDDFKGLEWRDLA

SEQ ID NO: 298 - protein, 186 aa, Artificial Sequence
  Description of Artificial Sequence:  Synthetic Peptide
MTLLVGLGNPTLRYAHTRHNAGFDILDSLVSELDLSFTFSPKHNAFLCVYKDFIFLKPQTYMNLSGESVLSAKNFYKTKELLIVHDDLDLPLGVVRFKNGGGNGGHNGLKSIDLLCSNSYYRLRVGISKGIGVIEHVLSKFHKNEEPLKNAAFEHAKNALKFFIESHDFNAMQNRFTLKKPLKIES

SEQ ID NO: 299 - protein, 479 aa, Artificial Sequence
  Description of Artificial Sequence:  Synthetic Peptide
MKKSLCLSFFLTFSNPLQALVIELLEEIKTSPHKGTFKAKVLDSKKPRQVLGVYNISPHKKLTLTITHISTAIVYQPLDEKLSLETTLNPNRPTIPRNTQIVFSSKELKESHPHQMPSLNAPMQKPQNKPHSSQQPSQNFSYPEPKLGSKNSKNSLLQPLAIPSKISPTNETQTPTNDTKPPLKHSSEDQESNLFITPPTEKTLPNNTSNADISENNESNENKDNVEKQAIRDANIKEFACGKWVYDDENLQAYRPSILKRVDEDKQTATDITPCDYSTAENKSGKIITPYTKISVHKTEPLEEPQTFEAKNNFAILQARSSTEKCKRARARKDGTTRQCYLIEEPLKQAWESEYEITTQLVKAIYERPKQDDQVEPTFYETSELAYSSTRKSEITHNELNLNEKFMEFVEVYEGHYLNDIIKESSEYKEWVKNHVRFKEGVCMALEIEEQPRAKSTPLSIENSRVVCVKKGNYLFNEV

SEQ ID NO: 300 - protein, 271 aa, Artificial Sequence
  Description of Artificial Sequence:  Synthetic Peptide
MNAFKRIISVGVIALGLFNLLDAKHHKEKKENHKITRELKVGANPVPHAQILQSVVDDLKEKGIKLVIVSFTDYVLPNLALNDGSLDANYFQHRPYLDRFNLDRKMHLVGLANIHVEPLRFYSQKITDIKNLKKGSVIAVPNDPANQGRALILLHKQGLIALKDPSNLYATEFDIVKNPYNIKIKPLEAALLPKVLGDVDGAIITGNYALQAKLTGALFSEDKDSPYANLIAAREDNAQDEAIKTLIEALQSEKTRKFILDTYKGAIIPAF

SEQ ID NO: 301 - protein, 588 aa, Artificial Sequence
  Description of Artificial Sequence:  Synthetic Peptide
MKNLRYKLLLFVFIGFWGLLALNLFILSVKNQEYYEKLAERNMTKKEFLVPTRGNITDRNDEFLATNELVFGVFLPSGLKQKDLLEKIEIIQKFFPNFSKETLLNNYQKENSLYNHNLIKVVGFIPYATMQPLYAKLIQTQGIFALPLDKRYYPNNALASHVLGYVGVASLQDLKDDEENQYSQIVGKTGIEKEYNKLLQGKVGYKIMRVNALNQELATLEVVLPSTNNHLQLSLDKRLQKEADKLFENKRGAILVMDAENGELLVAGSYPEYNLNDFVGGISQDKWQKLQDDIYNPLLNRFANALYPPGSVVKMGVGLSFLENLHITENTTIPTPPFIEVGKHKFRDWKKTGHGNSNLYKAIRESVDVYFYKFGLEISIEKLSKTLREVGFGEKTGVDLPNEFVGIVPDNLWKLKRFNQDWRVGDTLITAIGQGSFLATPLQVLAYTGLIATGKLATPHFAINNKQPLKDPLNSFQKKKLQALRVGMYEVCNHKDGTAYHSTRGSKITLACKTGTAQVVEIAQNIVNRMKEKDMEYFHRSHAWITAFLPYEKPKYAITILVEHGEGGSKLGGLLVKMSNKLYELGYL

SEQ ID NO: 302 - protein, 206 aa, Artificial Sequence
  Description of Artificial Sequence:  Synthetic Peptide
MFSGLIHQIAKVKSFHNNILNIESDLNPKLGDSIAINGACLTAIESSKTHFSVELSQKTQNSVALENYKDLVHIEPALKADASLDGHFVQGHIDAIGVIEKIIHNANQVDFFISASEETLLLCVEQGSIAVDGVSLTLSKVEEKGFWLTIIPYTLENTLFKAYKLKRRVNIETDMLVRSVASILKKTKGFEKNFSWNEADALTLGY

SEQ ID NO: 303 - protein, 40 aa, Artificial Sequence
  Description of Artificial Sequence:  Synthetic Peptide
KKSERFKIELKPFKKRPNRGAHRRALFQAYRSGFAFRRSH

SEQ ID NO: 304 - protein, 17 aa, Artificial Sequence
  Description of Artificial Sequence:  Synthetic Peptide
WFAKKDFSAWSATKRAF

SEQ ID NO: 305 - protein, 68 aa, Artificial Sequence
  Description of Artificial Sequence:  Synthetic Peptide
NLQTHLKRLKRSEFVGQKGIRGHGEVFFKRNFNAQPYLIGFTGLDFWQTFRLACECDGFDCHGFNGVL

SEQ ID NO: 306 - protein, 29 aa, Artificial Sequence
  Description of Artificial Sequence:  Synthetic Peptide
TQAIILKKNQAWGRGWIMRGVASIINSRE

SEQ ID NO: 307 - protein, 48 aa, Artificial Sequence
  Description of Artificial Sequence:  Synthetic Peptide
AMWILLKTSKTRNSKKIVWNLSKGLMSQSPLSLPLFITLGALSPLKKK

SEQ ID NO: 308 - protein, 23 aa, Artificial Sequence
  Description of Artificial Sequence:  Synthetic Peptide
KKKKSKNSKNSPWAWKCLSMCGV

SEQ ID NO: 309 - protein, 31 aa, Artificial Sequence
  Description of Artificial Sequence:  Synthetic Peptide
KKLIKSLALKKDTAIVMKSTPNTAKSGKIRA

SEQ ID NO: 310 - protein, 24 aa, Artificial Sequence
  Description of Artificial Sequence:  Synthetic Peptide
RGATPPRKKTLFLKKPSVLSRPNS

SEQ ID NO: 311 - protein, 18 aa, Artificial Sequence
  Description of Artificial Sequence:  Synthetic Peptide
SAQPPSLKRSLGGLKAMA

SEQ ID NO: 312 - protein, 14 aa, Artificial Sequence
  Description of Artificial Sequence:  Synthetic Peptide
KHDHGFWVRHSREF

SEQ ID NO: 313 - protein, 20 aa, Artificial Sequence
  Description of Artificial Sequence:  Synthetic Peptide
AKNTALKSLALGIRAMAMCM

SEQ ID NO: 314 - protein, 63 aa, Artificial Sequence
  Description of Artificial Sequence:  Synthetic Peptide
RFERQNLSLRYGSIGLQQLFIHRKPHYQNKSNGNLCGFDYHHRLIRASQWVLQHSKSAQQTQR

SEQ ID NO: 315 - protein, 49 aa, Artificial Sequence
  Description of Artificial Sequence:  Synthetic Peptide
SSVSSKKPAKNSLTRFLSSQGIILTGAMNTLKTICISLNPCRLFYMPLL

SEQ ID NO: 316 - protein, 34 aa, Artificial Sequence
  Description of Artificial Sequence:  Synthetic Peptide
KWNISTPKPPPKNGAIGWGIISLLSKTILIILGI

SEQ ID NO: 317 - protein, 27 aa, Artificial Sequence
  Description of Artificial Sequence:  Synthetic Peptide
KTRWIPTEKWRNSTMEAARRPFFRPFN

SEQ ID NO: 318 - protein, 76 aa, Artificial Sequence
  Description of Artificial Sequence:  Synthetic Peptide
KNFRAHDFFERRDCQYFYSVWRRAMGDSSSYHASGWAKLRGGSGSGFYGYRLGRCLDEYDTAFLGFARFSHCGFGR

SEQ ID NO: 319 - protein, 24 aa, Artificial Sequence
  Description of Artificial Sequence:  Synthetic Peptide
KARLKRFQIIPLISAEKAMLQAMR

SEQ ID NO: 320 - protein, 17 aa, Artificial Sequence
  Description of Artificial Sequence:  Synthetic Peptide
RAPFRREPWRLGGCCNL

SEQ ID NO: 321 - protein, 23 aa, Artificial Sequence
  Description of Artificial Sequence:  Synthetic Peptide
FTRHKQTSRSKRSKSLSVKNGVR

SEQ ID NO: 322 - protein, 26 aa, Artificial Sequence
  Description of Artificial Sequence:  Synthetic Peptide
FFSYIQYERRSSGYHRAWPFFRERFD

SEQ ID NO: 323 - protein, 21 aa, Artificial Sequence
  Description of Artificial Sequence:  Synthetic Peptide
RDLLAIPQRFARKQAFKKPSL

SEQ ID NO: 324 - protein, 11 aa, Artificial Sequence
  Description of Artificial Sequence:  Synthetic Peptide
KSPKKATKKRF

SEQ ID NO: 325 - protein, 13 aa, Artificial Sequence
  Description of Artificial Sequence:  Synthetic Peptide
ALEQRDERFTRGG

SEQ ID NO: 326 - protein, 101 aa, Artificial Sequence
  Description of Artificial Sequence:  Synthetic Peptide
PISCKAPKFVVSLCNSGMPLDLGPWKGKTATKSLSNSLFLKRSKNSLWVLKTIALALTFLCSSLMAEILITALPKLPFKILSPPLAAKGSLTGRKISVFRL

SEQ ID NO: 327 - protein, 15 aa, Artificial Sequence
  Description of Artificial Sequence:  Synthetic Peptide
KSITSRQAIKPILRA

SEQ ID NO: 328 - protein, 38 aa, Artificial Sequence
  Description of Artificial Sequence:  Synthetic Peptide
FKTLVELFKSQIPGAFRKHSHPRHSNFSVFKKSGKSGV

SEQ ID NO: 329 - protein, 31 aa, Artificial Sequence
  Description of Artificial Sequence:  Synthetic Peptide
NAIMKPKKPQYLKNSLNSSNFMITPLLKSKP

SEQ ID NO: 330 - protein, 16 aa, Artificial Sequence
  Description of Artificial Sequence:  Synthetic Peptide
IKALKPSLFERLNSLN

SEQ ID NO: 331 - protein, 62 aa, Artificial Sequence
  Description of Artificial Sequence:  Synthetic Peptide
AMLFFRFVTVSPTYAQPAPQVLEVTVPDGVPRRLPSLPFSWHTPKESFTNAAGILSKSFTTA

SEQ ID NO: 332 - protein, 35 aa, Artificial Sequence
  Description of Artificial Sequence:  Synthetic Peptide
GLFQNLTPHSKTPRSLRRANALKQKRVLTPHLLAC

SEQ ID NO: 333 - protein, 37 aa, Artificial Sequence
  Description of Artificial Sequence:  Synthetic Peptide
FVGPQEVPPIATPKKNPKCKFSRLKIAGLNNTSVPAP

SEQ ID NO: 334 - protein, 97 aa, Artificial Sequence
  Description of Artificial Sequence:  Synthetic Peptide
IRAFFKGVNLANFIDYGRDSRIFGSDDFISGVSGSGEFACKKTPVFGYFAIDLKIPFANGCLVVLSIQPFKRPSHQIAVRKTPVFKRVQFAGIKTRL

SEQ ID NO: 335 - protein, 41 aa, Artificial Sequence
  Description of Artificial Sequence:  Synthetic Peptide
KFFSNHLRRKVVFIDISLHVNAFLAHSNKSHSMQQSVKAIF

SEQ ID NO: 336 - protein, 14 aa, Artificial Sequence
  Description of Artificial Sequence:  Synthetic Peptide
SVGVKKSPPNSTSA

SEQ ID NO: 337 - protein, 66 aa, Artificial Sequence
  Description of Artificial Sequence:  Synthetic Peptide
TLTCKKVASKRALICALISLTLNTSTSSPFYSKRVRSLKSPKNMIKTKNPTPASHNAFCMGVGKVI

SEQ ID NO: 338 - protein, 63 aa, Artificial Sequence
  Description of Artificial Sequence:  Synthetic Peptide
ASMSLSNPVPLGIAAVTPTIFSSFLANSKRVLEYASVGDKIALLDFLDKPVSKSKGPTPCHFS

SEQ ID NO: 339 - protein, 85 aa, Artificial Sequence
  Description of Artificial Sequence:  Synthetic Peptide
IFLSNTSLCMGRTNCNTKSNENALASLNSTSKKSMHSKRALLKSFNFSCAFLSMGMELSIPTSSISCWICRLSAIKKFPVEQPKS

SEQ ID NO: 340 - protein, 83 aa, Artificial Sequence
  Description of Artificial Sequence:  Synthetic Peptide
RDFQVLKHRLHPFFFIFTQQAMIHKNSDQIILNGSVQQRSDHRRIHAPTHRAQNLSVSDFFFQSCDFSLSEMLHPPSFFTAAN

SEQ ID NO: 341 - protein, 39 aa, Artificial Sequence
  Description of Artificial Sequence:  Synthetic Peptide
IIHMRGDHSHHMPSFFQRFKKTKRCHRSAITGVFKTIHD

SEQ ID NO: 342 - protein, 44 aa, Artificial Sequence
  Description of Artificial Sequence:  Synthetic Peptide
IIIPAVLANDHAHINLRLGVDKKRASFLDIEKGKSGRFAIFHAD

SEQ ID NO: 343 - protein, 25 aa, Artificial Sequence
  Description of Artificial Sequence:  Synthetic Peptide
KNRPSKNPLAQNAVVSALAPGKTSY

SEQ ID NO: 344 - protein, 22 aa, Artificial Sequence
  Description of Artificial Sequence:  Synthetic Peptide
KPSSVWIYKPIIRGKNIQTIPS

SEQ ID NO: 345 - protein, 49 aa, Artificial Sequence; identical to SEQ ID NO: 315
  Description of Artificial Sequence:  Synthetic Peptide

SEQ ID NO: 346 - protein, 43 aa, Artificial Sequence
  Description of Artificial Sequence:  Synthetic Peptide
RARSRSLLGFFLLKASCKTPHKSLNFHLSNSKQGKWRIKSFWK

SEQ ID NO: 347 - protein, 87 aa, Artificial Sequence
  Description of Artificial Sequence:  Synthetic Peptide
VSEILSTLVSPSKLPEEPKAKLMRWGASAPFLGSNCKRGGFMPASDPSLLKCKRPPSNTLGLAADPPTNSPGSGTITLKFHSAPPLL

SEQ ID NO: 348 - protein, 36 aa, Artificial Sequence
  Description of Artificial Sequence:  Synthetic Peptide
LPNLNKISSSSFTKYTSKTSGLMWHSLKGFHFPFKA

SEQ ID NO: 349 - protein, 26 aa, Artificial Sequence
  Description of Artificial Sequence:  Synthetic Peptide
SRFRERVAALFTKRAQRKRFRHSFIA

SEQ ID NO: 350 - protein, 41 aa, Artificial Sequence
  Description of Artificial Sequence:  Synthetic Peptide
NIHWPHAPNRSLLNPKIVAGNPSSLEYRFALNSPQKAPQHR

SEQ ID NO: 351 - protein, 101 aa, Artificial Sequence; identical to SEQ ID NO: 326
  Description of Artificial Sequence:  Synthetic Peptide

SEQ ID NO: 352 - protein, 27 aa, Artificial Sequence
  Description of Artificial Sequence:  Synthetic Peptide
ESLVLKPILGKRRCKGCCPPSKPLLAL

SEQ ID NO: 353 - protein, 28 aa, Artificial Sequence
  Description of Artificial Sequence:  Synthetic Peptide
GSNERSHKERLSIQTHRIASRDFDICPL

SEQ ID NO: 354 - protein, 92 aa, Artificial Sequence
  Description of Artificial Sequence:  Synthetic Peptide
LGGNKSFTLYSHHTSQPFFSKRLATCSKTSLSKQGLFVRLSMKKASGTPHFLCRLKHQSGRFSIMVFRRFFPLLGTNSTFSIASKATSLKVF

SEQ ID NO: 355 - protein, 33 aa, Artificial Sequence
  Description of Artificial Sequence:  Synthetic Peptide
AFVLKPCKKACSWSFKFSLANSTLESKLLYSFK

SEQ ID NO: 356 - protein, 62 aa, Artificial Sequence
  Description of Artificial Sequence:  Synthetic Peptide
ESISSLILSKIMIVSLMEYPIKVSKAAITSKFISILKTITELATKITSCTSAMTLAKAKRHS

SEQ ID NO: 357 - protein, 36 aa, Artificial Sequence
  Description of Artificial Sequence:  Synthetic Peptide
RLAGLLRKGGEKIGEKLKKIGQKIKNFFQKLVPQPE

SEQ ID NO: 358 - protein, 11 aa, Artificial Sequence
  Description of Artificial Sequence:  Synthetic Peptide
KLKLLLLLKLK
